(19) United States
(12) Patent Application Publication
(10) Pub. No.: US 2024/0299510 A1
(43) Pub. Date: Sep. 12, 2024

(54) ANTIBODY-GUIDED PCSK9-MIMICKING IMMUNOGENS LACKING 9-RESIDUE SEQUENCE OVERLAP WITH HUMAN PROTEINS

(71) Applicant: The United States of America,as represented by the Secretary,Department of Health and Human Services, Bethesda, MD (US)

(72) Inventors: Peter D. Kwong, Washington, DC (US); Gwo-Yu Chuang, Rockville, MD (US); Baoshan Zhang, Bethesda, MD (US); Wing-Pui Kong, Germantown, MD (US); Yiran Wang, Nibley, UT (US); Cara Chao, Gaithersburg, MD (US); John R. Mascola, Rockville, MD (US); Li Ou, Potomac, MD (US); Tongqing Zhou, Boyds, MD (US); Yongping Yang, Potomac, MD (US); Bohan Liu, New York, NY (US); Cheng Cheng, Bethesda, MD (US); Daniel W. Biner, Rockville, MD (US); Reda Rawi, North Bethesda, MD (US)

(73) Assignee: The United States of America,as represented by the Secretary,Department of Health and Human Services, Bethesda, MD (US)

(21) Appl. No.: 18/270,436

(22) PCT Filed: Dec. 31, 2021
(86) PCT No.: PCT/US2021/065856

§ 371 Date: Jun. 29, 2023

Related U.S. Application Data
(60) Provisional application No. 63/132,640, filed on Dec. 31, 2020.

(51) Int. Cl. A61K 39/00; A61K 45/06; A61P 3/06; C12N 9/64

(52) U.S. Cl. CPC A61K 39/0005; A61K 45/06; A61P 3/06; C12N 9/6454; C12Y 304/21061

(57) ABSTRACT

The present disclosure describes the grafting of epitope residues from human PCSK9 to non-human PCSK9 or PCSK9 structural homologs and elimination of 9-mers oligopeptides that are found in human protein to reduce self-targeting response. Anti-genicity of the epitope-scaffold constructs was demonstrated toward anti-human PCSK9 antibodies. similar to wild type human PCSK9. It was shown that disclosed PCSK9 immunogens could significantly reduce LDL and cholesterol levels in immunized mice.

### CROSS-REFERENCE TO RELATED APPLICATIONS

[0001] This patent application claims the benefit of U.S. Provisional Patent Application No. 63/132,640, filed Dec. 31, 2020, which is incorporated by reference.

### STATEMENT REGARDING FEDERALLY SPONSORED RESEARCH AND DEVELOPMENT

[0002] This invention was made with Government support under project numbers Z01AI005024-19 and ZICAI005114-10 by the National Institutes of Health, National Institute of Allergy and Infectious Diseases. The Government has certain rights in the invention.

### TECHNICAL FIELD

[0003] The present invention is related to the fields of molecular biology, immunology and medicine. The invention provides a composition comprising immunogens with residues from human proprotein convertase subtilisin-kexin type 9 (PCSK9). The invention also provides methods for producing the compositions of the invention. The compositions of the invention are useful in the production of vaccines for the prevention, treatment or alleviation of PCSK9-related disorders, cardiovascular diseases, and other diseases and conditions, including dyslipidemias.

### INCORPORATION-BY-REFERENCE OF MATERIAL SUBMITTED ELECTRONICALLY

[0004] Incorporated by reference in its entirety herein is a computer-readable nucleotide/amino acid sequence listing submitted concurrently herewith and identified as follows: one 863,561Byte ASCII (Text) file named “758174_ST25.txt,” dated Dec. 31, 2021.

### BACKGROUND OF THE INVENTION

[0005] Proprotein convertase subtilisin-kexin type 9 (hereinafter “PCSK9”), is a proteinase K-like subtilase identified as the 9th member of the mammalian PCSK family (Seidah et al, 2003 PNAS 100:928-933). The gene for PCSK9 localizes to human chromosome 1p33-p34.3, and is expressed in cells capable of proliferation and differentiation including, for example, hepatocytes, kidney mesenchymal cells, intestinal ileum, and colon epithelia as well as embryonic brain telencephalon neurons.

[0006] Structurally, PCSK9 includes a 30 amino acid signal peptide, followed by a prodomain (amino acids 31-152), a catalytic domain (amino acids 153-425) and a CHRD (C-terminal cysteine/histidine-rich domain) (amino acids 426-692). The NCBI reference sequence for human PCSK9 is NP_777596.2 (SEQ ID NO: 108). PCSK9 is synthesized as an approximately 72 kDa precursor protein that undergoes autocatalytic cleavage in the endoplasmic reticulum. After cleavage, the approximately 14 kDa prodomain remains tightly associated with the active site, rendering the mature protein catalytically inactive. PCSK9 undergoes a variety of post-translational modifications before being secreted efficiently from the cell.

[0007] In cell-culture systems, overexpression of PCSK9 resulted in a decrease in LDL-receptor (LDLR) levels via a post-transcriptional mechanism (Park, et al, 2004 J. Biol. Chem. 279:50630-638). It has been shown that PCSK9 forms a direct protein-protein interaction with the EGF-A (epidermal growth factor-like repeat A) domain of the LDLR that results in targeting of the LDLR to lysosomes for degradation (Kwon et al, 2008 PNAS 105:1820-1825: Zhang, et al, 2007 J. Biol. Chem. 282:18602-18612). This interaction appears to be necessary for PCSK9-mediated LDLR degradation (Li et al, 2007 Biochem. J. 406:203-207; McNutt et al, 2007 J. Biol. Chem. 282:20799-20803). Studies using surface plasmon resonance demonstrated that direct binding of PCSK9 to the LDLR could be abolished with three different anti-PCSK9 antibodies, and these antibodies blocked the PCSK9-LDLR interaction by inhibiting the action of PCSK9 produced endogenously (Duff et al, 2009 Biochem. J. 419:577-584). A neutralizing anti-PCSK9 monoclonal antibody that binds an epitope on PCSK9 adjacent to the region required for LDLR interaction was shown to inhibit PCSK9 binding to the LDLR and attenuate PCSK9-mediated reduction in LDLR protein levels, thereby increasing LDL uptake. Additionally, a combination of this antibody with a statin increased LDLR levels in HepG2 cells more than either treatment alone (Chan et al, 2009 PNAS 106:9820-25). Subsequently, a fully human PCSK9 monoclonal antibody was shown to increase the recycling of LDL receptors and reduce LDL cholesterol levels (Roth et al, N Engl J Med 2012, 367: 1891-900). Unfortunately, treatment to reduce LDL cholesterol by the administration of anti-PCSK9 antibodies is expensive and requires frequent administration of the antibodies to produce therapeutic effects.

[0008] Accordingly, it would be of great therapeutic benefit to produce a vaccine that could safely induce antibodies that antagonize the activity of PCSK9 for the treatment of various therapeutic conditions associated with PCSK9, such as increased plasma levels of LDL cholesterol.

### BRIEF SUMMARY OF THE INVENTION

[0009] The present invention relates to immunogens produced by the grafting of epitope residues from human PCSK9 to non-human PCSK9 or PCSK9 structural homologs and elimination of all 9 residue sequence overlaps with human protein to reduce self-targeting response. In the context of the invention, the grafted “epitope” residues are residues that are part of the recognition site of an antibody that can reduce cholesterol by binding to an epitope on PCSK9. Also disclosed are vaccine constructs comprising such immunogens and an immunogenic carrier, as well as methods for producing such immunogens, and pharmaceutical compositions comprising such immunogens, as well as uses of such compositions, in the treatment, alleviation or prophylaxis of PCSK9-related disorders. Such pharmaceutical compositions optionally comprise one or several adjuvants. Such pharmaceutical compositions optionally comprise one or several pharmaceutical carriers.

[0010] In particular, the present disclosure relates to an antigenic PCSK9 peptide of the invention, or an immunogenic or pharmaceutical composition thereof, for use as a medicament preferably in treatment, alleviation or prophylaxis of diseases associated with elevated levels of cholesterol in a mammal.

[0011] The immunogens of the present disclosure are useful in the treatment of patients having, or at risk for, elevated LDL-cholesterol or a condition associated with elevated LDL-cholesterol, e.g., a lipid disorder (e.g., hyperlipidemia, type I, type II, type III, type IV, or type V hyperlipidemia, secondary hypertriglyceridemia, hypercholesterolemia, familial hypercholesterolemia, xanthomatosis, cholesterol acetyltransferase deficiency). The immunogens of the present disclosure are also useful in the treatment of patients having arteriosclerotic conditions (e.g., atherosclerosis), coronary artery disease, cardiovascular disease, and patients at risk for these disorders, e.g., due to the presence of one or more risk factors, such as hypertension, cigarette smoking, diabetes, obesity, or hyperhomocysteinemia. The immunogens of the present disclosure are also useful in the treatment of Alzheimer's disease in a patient.

[0012] In certain aspects, the immunogens of the present disclosure may be administered together with another agent, such as, for example a statin.

[0013] In one aspect, an immunogen of the present disclosure comprises grafting of human PCSK9 antibody epitopes to iridescent shark PCSK9 and removing all 9-residue sequence overlaps with human proteins.

[0014] In another aspect, an immunogen of the present disclosure comprises grafting of human PCSK9 antibody epitopes to iridescent shark PCSK9 and removing all 9-residue sequence overlaps with human proteins and further inserting at least one HRV-3C cleavage site to remove the C-terminal domain.

[0015] In another aspect, an immunogen of the present disclosure comprises grafting of human PCSK9 antibody epitopes to iridescent shark PCSK9 and removing all 9-residue sequence overlaps with human proteins and further inserting at least one HRV-3C cleavage site to remove the C-terminal domain and flanking the cleavage site with the peptide sequence gly-ser-gly.

[0016] In yet another aspect, an immunogen of the present disclosure comprises grafting of human PCSK9 antibody epitopes to iridescent shark PCSK9 and removing all 9-residue sequence overlaps with human proteins and adding a T-cell help peptide from tetanus toxoid to C-terminal.

[0017] In another aspect, an immunogen of the present disclosure comprises grafting of human PCSK9 antibody epitopes to iridescent shark PCSK9 and removing all 9-residue sequence overlaps with human proteins and introducing mutations in the peptide sequence to reduce non-specific cleavage.

[0018] In another aspect, an immunogen of the present disclosure comprises grafting of human PCSK9 antibody epitopes to iridescent shark PCSK9 and removing all 9-residue sequence overlaps with human proteins and modifying the catalytic site of PCSK9, and optionally truncating the N-terminal.

[0019] In another aspect, an immunogen of the present disclosure comprises grafting of human PCSK9 antibody epitopes to iridescent shark PCSK9 and removing all 9-residue sequence overlaps with human proteins and modifying the putative cleavage site in the loop region of PCSK9 by introducing mutations in the peptide sequence of PCSK9.

[0020] In yet another aspect, an immunogen of the present disclosure comprises grafting of human PCSK9 antibody epitopes to iridescent shark PCSK9 and removing all 9-residue sequence overlaps with human proteins and inactivating PCSK9 by mutation D186, and adding a Furin cleavage site to make sure PCSK9 cleaves correctly.

[0021] In yet another aspect, an immunogen of the present disclosure comprises grafting of human PCSK9 antibody epitopes to iridescent shark PCSK9 and removing all 8-residue sequence overlaps with human proteins.

[0022] In another aspect, an immunogen of the present disclosure comprises grafting of human PCSK9 antibody epitopes to iridescent shark PCSK9 and removing all 8-residue sequence overlaps with human proteins comprising identifying a single mutation to remove one such 8-residue sequence overlap.

[0023] In another aspect, an immunogen of the present disclosure comprises identifying an alternative PCSK9 homologous sequence and removing all 9-residue sequence overlaps with human proteins.

[0024] In another aspect, an immunogen of the present disclosure comprises identifying an alternative PCSK9 homologous sequence and removing all 8-residue sequence overlaps with human proteins.

[0025] In another aspect, an immunogen of the present disclosure comprises grafting of human PCSK9 antibody epitopes to iridescent shark PCSK9 and removing four of six identical 8-residue sequence overlaps with human proteins.

[0026] In yet another aspect, an immunogen of the present disclosure comprises grafting of human PCSK9 antibody epitopes to iridescent shark PCSK9 and modifying the calcium binding loop to stabilize PCSK9.

[0027] In a further aspect, an immunogen of the present disclosure comprises grafting of human PCSK9 antibody epitopes to iridescent shark PCSK9 and inserting an inhibitory peptide to reduce catalytic activity.

[0028] In another aspect, an immunogen of the present disclosure comprises grafting of human PCSK9 antibody epitopes to iridescent shark PCSK9 and attaching an immunogenic carrier rTTHc.

[0029] A related aspect is a composition comprising the immunogen of this aspect of the invention. Such composition may further comprise at least one adjuvant.

[0030] Another related aspect is a nucleic acid encoding the immunogen of this aspect of the invention, as well as an expression vector comprising such nucleic acid, and a host cell comprising such expression vector.

[0031] Another aspect of the invention is a method of preventing, alleviating, or treating a dyslipidemia in an individual, comprising administering a therapeutically effective amount of the immunogen to the individual. Dyslipidemia may include lipid disorders such as hyperlipidemia from type I, type II, type III, type IV, or type V hyperlipidemia, secondary hypertriglyceridemia, secondary hypercholesterolemia, familial hypercholesterolemia, familial combined hyperlipidemia, xanthomatosis, and lecithin:cholesterol acetyltransferase deficiency.

[0032] Another aspect of the invention is a method of preventing, alleviating, or treating a condition selected from atherosclerosis, coronary artery disease, cardiovascular disease, and Alzheimer's disease in an individual, comprising administering a therapeutically effective amount of the immunogen to the individual.

[0033] The following numbered paragraphs [0032]-[0115] contain statements of broad combinations of the inventive technical features herein disclosed:
[0034] 1. A composition comprising a non-human proprotein convertase subtilisin-kexin type 9 (PCSK9) structural homolog which has been grafted with one or more human PCSK9 peptides, wherein the composition does not comprise any 9 or more sequential residue overlaps with human PCSK9.
[0035] 2. The composition of aspect 1, wherein the PCSK9 structural homolog is selected from the group consisting of iridescent shark PCSK9, channel catfish PCSK9, black rockcod PCSK9, climbing perch PCSK9, pupfish PCSK9, a cold adapted subtilisin-like serine proteinase, keratinase from Meiothermus taiwanensis WR-220e, Proteinase K like enzyme from a psychrotroph Serratia, a cold adapted subtilisin-like serine proteinase, Cuticle-Degrading Protease from Paecilomyces lilacinus, and a serine protease from an extreme thermophile.
[0036] 3. The composition of aspect 2, wherein the PCSK9 structural homolog is iridescent shark PCSK9.
[0037] 4. The composition of aspect 3, comprising the peptide sequence of SEQ ID NO: 1.
[0038] 5. The composition of aspect 3, comprising a peptide sequence having at least 95% identity to SEQ ID NO: 1.
[0039] 6. The composition of aspect 3, comprising a peptide sequence having at least 90% identity to SEQ ID NO: 1.
[0040] 7. The composition of any one of aspects 1 to 3, wherein a HRV-3C cleavage site is inserted to remove a portion of the C-terminal domain.
[0041] 8. The composition of aspect 7, comprising a peptide sequence selected from the group consisting of SEQ ID NOs: 2 to 9.
[0042] 9. The composition of any one of aspects 1 to 3 and 7, further comprising a T-cell helper peptide from tetanus toxoid.
[0043] 10. The composition of aspect 9, comprising a peptide sequence selected from the group consisting of SEQ ID NOs: 10 to 12.
[0044] 11. The composition of any one of aspects 1 to 3, 7 and 9, wherein the one or more human PCSK9 peptides comprises amino acid residue substitutions to reduce non-specific cleavage.
[0045] 12. The composition of aspect 11, comprising a peptide sequence selected from the group consisting of SEQ ID NOs: 13 to 14.
[0046] 13. The composition of any one of aspects 1 to 3, 7, 9 and 11, wherein a PCSK9 catalytic site is modified.
[0047] 14. The composition of aspect 13, comprising a peptide sequence selected from the group consisting of SEQ ID NOs: 15 to 24.
[0048] 15. The composition of any one of aspects 1 to 3, 7, 9, 11 and 13, wherein a putative cleavage site in the loop region of the PCSK9 structural homolog is mutated.
[0049] 16. The composition of aspect 15, comprising a peptide sequence selected from the group consisting of SEQ ID NOs: 25 to 29.
[0050] 17. The composition of any one of aspects 1 to 3, 7, 9, 11, 13 and 15, wherein the PCSK9 structural homolog is mutated at position D186 and a Furin cleavage site is added.
[0051] 18. The composition of aspect 17, comprising a peptide sequence selected from the group consisting of SEQ ID NOs: 30 to 37.
[0052] 19. The composition of any one of aspects 1 to 3, 7, 9, 11, 13, 15 and 17, wherein all 8 or more sequential residue overlaps with human PCSK9 are removed.
[0053] 20. The composition of aspect 19, comprising a peptide sequence selected from the group consisting of SEQ ID NOs: 38 to 53.
[0054] 21. The composition of any one of aspects 1 to 3, 7, 9, 11, 13, 15 and 17, wherein at least one 8 sequential residue overlaps with human PCSK9 is removed.
[0055] 22. The composition of aspect 21, comprising a peptide sequence selected from the group consisting of SEQ ID NOs: 54-63 and 71 to 85.
[0056] 23. The composition of any one of aspects 1 to 3, 7, 9, 11, 13, 15, 17, 19 and 21 wherein a Ca2+binding loop of PCSK9 is modified.
[0057] 24. The composition of aspect 23, comprising a peptide sequence selected from the group consisting of SEQ ID NOs: 87 to 89.
[0058] 25. The composition of any one of aspects 1 to 3, 7, 9, 11, 13, 15, 17, 19, 21 and 23, wherein an inhibitory peptide is inserted in the Ca2+binding loop.
[0059] 26. The composition of aspect 25, comprising a peptide sequence selected from the group consisting of SEQ ID NOs: 90 to 91.
[0060] 27. The composition of any one of aspects 1 to 3, 7, 9, 11, 13, 15, 17, 19, 21, 23 and 25, further comprising an immunogenic carrier.
[0061] 28. The composition of aspect 27, wherein the immunogenic carrier is selected from the group consisting of rTTHc, a nanoparticle, SPYTAG, and SPYCATCHER.
[0062] 29. The composition of aspect 28, wherein the immunogenic carrier is rTTHc.
[0063] 30. The composition of aspect 29, comprising the peptide sequence selected from the group consisting of SEQ ID NOs: 92, 114, and 116.
[0064] 31. The composition of aspect 29, comprising a peptide sequence having at least 95% identity to a sequence selected from the group consisting of SEQ ID NOs: 92, 114, and 116.
[0065] 32. The composition of any one of aspects 1 to 3, 7, 9, 11, 13, 15, 17, 19, 21, 23, 25, and 27 to 29, wherein the immunogenic carrier is conjugated to a cysteine residue which has been added to the PCSK9 structural homolog.
[0066] 33. The composition of aspect 32, comprising a peptide sequence selected from the group consisting of SEQ ID NOS: 108 to 112.
[0067] 34. The composition of aspect 28, wherein the nanoparticle contains a SPYTAG.
[0068] 35. The composition of aspect 34, wherein the peptide sequence is selected from the group consisting of SEQ ID NOS: 114 to 116, 119, 121, 122, 135 to 144, and 146.
[0069] 36. The composition of aspect 28, wherein the nanoparticle contains a SPYCATCHER.
[0070] 37. The composition of aspect 36, wherein the peptide sequence is selected from the group consisting of SEQ ID NOS: 117, 118, 120, 123-134, and 145.
[0071] 38. The composition of aspect 3, comprising the peptide sequence of SEQ ID NO: 93.
[0072] 39. The composition of any one of aspects 1, 2, 7, 9, 11, 13, 15, 17, 19, 21, 23, 25, 27 to 29, 32, 34 and 36, wherein the PCSK9 structural homolog is channel catfish PCSK9.
[0073] 40. The composition of aspect 39, comprising a peptide sequence selected from the group consisting of SEQ ID NOs: 64, 65 and 94.
[0074] 41. The composition of any one of aspects 1, 2, 7, 9, 11, 13, 15, 17, 19, 21, 23, 25, 27 to 29, 32, 34 and 36, wherein the PCSK9 structural homolog is black rockcod PCSK9.
[0075] 42. The composition of aspect 41, comprising a peptide sequence selected from the group consisting of SEQ ID NOs: 66, 95 and 96.
[0076] 43. The composition of any one of aspects 1, 2, 7, 9, 11, 13, 15, 17, 19, 21, 23, 25, 27 to 29, 32, 34 and 36, wherein the PCSK9 structural homolog is climbing perch PCSK9.
[0077] 44. The composition of aspect 43, comprising a peptide sequence selected from the group consisting of SEQ ID NOs: 67, 97 and 98.
[0078] 45. The composition of any one of aspects 1, 2, 7, 9, 11, 13, 15, 17, 19, 21, 23, 25, 27 to 29, 32, 34 and 36, wherein the PCSK9 structural homolog is pupfish PCSK9.
[0079] 46. The composition of aspect 45, comprising a peptide sequence selected from the group consisting of SEQ ID NOs: 68 and 99.
[0080] 47. The composition of any one of aspects 1, 2, 7, 9, 11, 13, 15, 17, 19, 21, 23, 25, 27 to 29, 32, 34 and 36, wherein the PCSK9 structural homolog is cold adapted subtilisin-like serine proteinase.
[0081] 48. The composition of aspect 47, comprising a peptide sequence selected from the group consisting of SEQ ID NOs: 100 and 104.
[0082] 49. The composition of any one of aspects 1, 2, 7, 9, 11, 13, 15, 17, 19, 21, 23, 25, 27 to 29, 32, 34 and 36, wherein the PCSK9 structural homolog is keratinase from Meiothermus taiwanensis WR-220e.
[0083] 50. The composition of aspect 49, comprising a peptide sequence selected from the group consisting of SEQ ID NOs: 101 and 107.
[0084] 51. The composition of any one of aspects 1, 2, 7, 9, 11, 13, 15, 17, 19, 21, 23, 25, 27 to 29, 32, 34 and 36, wherein the PCSK9 structural homolog is a Proteinase K like enzyme from a psychrotroph Serratia.
[0085] 52. The composition of aspect 51, comprising a peptide sequence selected from the group consisting of SEQ ID NOs: 102 and 103.
[0086] 53. The composition of any one of aspects 1, 2, 7, 9, 11, 13, 15, 17, 19, 21, 23, 25, 27 to 29, 32, 34 and 36, wherein the PCSK9 structural homolog is a Cuticle-Degrading Protease from Paecilomyces lilacinus.
[0087] 54. The composition of aspect 53, comprising the peptide sequence of SEQ ID NO: 105.
[0088] 55. The composition of any one of aspects 1, 2, 7, 9, 11, 13, 15, 17, 19, 21, 23, 25, 27 to 29, 32, 34 and 36, wherein the PCSK9 structural homolog is a serine protease from an extreme thermophile.
[0089] 56. The composition of aspect 55, comprising the peptide sequence of SEQ ID NO: 106.
[0090] 57. The composition of any one of aspects 1, 2, 7, 9, 11, 13, 15, 17, 19, 21, 23, 25, 27 to 29, 32, 34, 36, 39, 41, 43, 45, 47, 49, 51, 53, and 55 wherein the composition selectively binds to PCSK9-specific antibodies.
[0091] 58. The composition of any one of aspects 1, 2, 7, 9, 11, 13, 15, 17, 19, 21, 23, 25, 27 to 29, 32, 34, 36, 39, 41, 43, 45, 47, 49, 51, 53, 55 and 57, wherein the composition further comprises at least one adjuvant.
[0092] 59. The composition of any one of aspects 1 to 3, comprising a peptide sequence selected from the group consisting of SEQ ID NOs: 123 to 146.
[0093] 60. A method of preventing, alleviating, or treating a dyslipidemia in an individual, comprising administering a therapeutically effective amount of the composition of any one of aspects 1 to 59 to the individual.
[0094] 61. The method according to aspect 60, wherein the dyslipidemia is selected from a group of hyperlipidemias consisting of type I, type II, type III, type IV, or type V hyperlipidemia, secondary hypertriglyceridemia, secondary hypercholesterolemia, hypercholesterolemia, familial hypercholesterolemia, familial combined hyperlipidemia xanthomatosis, and lecithin:cholesterol acetyltransferase deficiency.
[0095] 62. The method of aspect 60 or 61, wherein the composition is administered in combination with at least one additional therapeutic agent selected from the group consisting of a statin, a bile acid sequestrant, niacin, a fibric acid derivative, and a long chain alpha, omega-dicarboxylic acid.
[0096] 63. A method of preventing, alleviating, or treating a condition selected from atherosclerosis, coronary artery disease, cardiovascular disease, acute coronary syndrome, and Alzheimer's disease in an individual, comprising administering a therapeutically effective amount of the composition of any one of aspects 1 to 59 to the individual.
[0097] 64. The method of aspect 63, wherein the composition is administered in combination with at least one additional therapeutic agent selected from the group consisting of a statin, a bile acid sequestrant, niacin, a fibric acid derivative, and a long chain alpha, omega-dicarboxylic acid.
[0098] 65. A method of preventing, alleviating, or treating hypertriglyceridemia in an individual, comprising administering a therapeutically effective amount of the composition of any one of aspects 1 to 59 to the individual.
[0099] 66. The method of aspect 65, wherein the composition is administered to the individual in combination with at least one adjuvant.
[0100] 67. The method of aspect 65 or 66, wherein the composition is administered to the individual in combination with at least one of a statin and a fibric acid derivative.
[0101] 68. Use of the composition of any one of aspects 1 to 59 in the manufacture of a medicament for the treatment of a dyslipidemia selected from a group of hyperlipidemias consisting of type I, type II, type III, type IV, or type V hyperlipidemia, secondary hypertriglyceridemia, secondary hypercholesterolemia, hypercholesterolemia, familial hypercholesterolemia, familial combined hyperlipidemia xanthomatosis, and lecithin: cholesterol acetyltransferase deficiency.
[0102] 69. Use of the composition of any one of aspects 1 to 59 in the manufacture of a medicament for the treatment of a disease state selected from atherosclerosis, coronary artery disease, cardiovascular disease, acute coronary syndrome, and Alzheimer's disease.
[0103] 70. The composition of any one of aspects 1 to 59 for use in the treatment of a dyslipidemia selected from a group of hyperlipidemias consisting of type I, type II, type III, type IV, or type V hyperlipidemia, secondary hypertriglyceridemia, secondary hypercholesterolemia, hypercholesterolemia, familial hypercholesterolemia, familial combined hyperlipidemia xanthomatosis, and lecithin:cholesterol acetyltransferase deficiency.
[0104] 71. The composition of any one of aspects 1 to 59 for use in the treatment of a disease state selected from atherosclerosis, coronary artery disease, cardiovascular disease, acute coronary syndrome, and Alzheimer's disease.
[0105] 72. A nucleic acid encoding an antigenic proprotein convertase subtilisin-kexin type 9 (PCSK9) peptide and a non-human PCSK9 structural homolog wherein the nucleic acid does not encode any 9 or more sequential residue overlaps with human PCSK9.
[0106] 73 The nucleic acid of aspect 72, wherein the nucleic acid is an RNA molecule.
[0107] 74. The nucleic acid of aspect 72 or 73, wherein the nucleic acid encodes HIT01 (SEQ ID NO:1), HIT01-K21Q-R218E (SEQ ID NO:14), HIT01-Combo3 (SEQ ID NO:85), or HIT01-K21Q-R218E 9glycans-SpyT 3CHS (SEQ ID NO:146).
[0108] 75. The nucleic acid of any one of aspects 72-74, operably linked to a promoter.
[0109] 76. A vector comprising the nucleic acid of any one of aspects 71-75.
[0110] 77. The vector of aspect 76, wherein the vector is a viral vector.
[0111] 78. A host cell comprising the vector of aspect 76 or 77.
[0112] 79. An immunogenic composition comprising the vector of aspect 76 or 77.
[0113] 80. A method of preventing, alleviating, or treating a cancer in an individual, comprising administering a therapeutically effective amount of the composition of any one of aspects 1 to 59 to the individual.
[0114] 81. The method of aspect 80, further comprising administering at least one cancer therapeutic agent to the individual.
[0115] 82. The method of aspect 81, wherein the cancer therapeutic agent is an immune checkpoint therapy agent.

[0116] This Summary of the Invention is neither intended nor should it be construed as being representative of the full extent and scope of the present invention. Moreover, references made herein to “the present invention,” or aspects thereof, should be understood to mean certain aspects of the present invention and should not necessarily be construed as limiting all aspects to a particular description. The present invention is set forth in various levels of detail in the Summary of the Invention as well as in the attached drawings and the Description of Invention and no limitation as to the scope of the present invention is intended by either the inclusion or non-inclusion of elements, components, etc. in this Summary of the Invention. Additional aspects of the present invention will become more readily apparent from the Description of Invention, particularly when taken together with the drawings.

### BRIEF DESCRIPTION OF THE SEVERAL VIEWS OF THE DRAWINGS

[0117] FIGS. 1A-1D illustrate a particular design of a hPCKS9-mimic, referred to as HIT01, produced by grafting human PCSK9 antibody epitope residues on to Iridescent shark PCKS9, with no 9-residue sequence overlaps with human proteins. FIG. 1A illustrates the published crystal structures of human PCSK9 in complex with LDL-R and various therapeutic antibodies respectively. FIG. 1B shows the buried surface area of PCSK9 residues to LDL-R and various therapeutic antibodies respectively. FIG. 1C shows non-human PCSK9 with the least number of 9-residue sequences identical to 9-residue sequence found in human proteins. FIG. 1D illustrates schematic of design PCSK9-mimic HIT01 by grafting the hPCSK9 epitope residues on to iridescent shark PCKS9 and removing 9-residue sequence overlaps with human proteins.

[0118] FIGS. 2A-2C illustrate the antigenic and biophysical properties of HIT01. FIG. 2A illustrates the size-exclusion chromatography (SEC) profile of PCSK9-mimic HIT01. FIG. 2B illustrates the binding profile (left) of PCSK9-mimic HIT01 and (right) of human PCSK9 to various PCKS9-binding antibodies. FIG. 2C illustrates the apparent KD of HIT01 binding to AMG145 and J16 as determined by using Octet, solid lines are observed response curves and dotted lines are fitting curves.

[0119] FIGS. 3A-3D illustrate that immunization of HIT01 significantly reduces cholesterol and LDL-C in mice. FIG. 3A illustrates the immunization scheme. FIG. 3B illustrates the sera concentration of LDL-C, total cholesterol, and HDL-C at week 4, revealing that immunization with PCSK9 HIT01 showed significant reduction of LDL-C, HDL-C, and cholesterol compared to the PBS control group. FIG. 3C illustrates the sera Octet response against hPCSK9 and mPCSK9, with and without competition by antibody AMG145. FIG. 3D illustrates the correlation of sera response targeting AMG145 epitope, as defined by mPCSK9 binding Octet minus mPCSK9 binding Octet when competed by antibody AMG145 for cholesterol (left) and LDL-C (right).

[0120] FIG. 4 are photographs of SDS PAGE, which concern the stability of PCSK9 protein and PCSK9 HIT01. FIG. 4 illustrates SDS-PAGE gel image of recombinant PCSK9 wild type protein at reducing and non-reducing conditions (left panel): the image on right panel illustrates SDS-PAGE gel image of recombinant HIT01 protein at fresh, incubated 4° C. about 3-4 weeks. HIT01 proteins was cleaved into 5 fragments after incubation at 4° C. indicating HIT01 protein is not stable when stored at 4° C.

[0121] FIG. 5 depicts data concerning the Mass Spec of the PCSK9 HIT01 protein in solution (left) juxtaposed with a photograph of SDS-PAGE showing the five bands resolved from proteolysis of the PCSK9 HIT01 protein (right). Protein bands of cleaved HIT01 protein were cut off from SDS-PAGE gel and sent for Mass Spec analysis. The upper panel in FIG. 5 indicated the molecular weight of each band. Protein N-terminal sequences analysis were performed to identify the cleavage sites.

[0122] FIGS. 6A through 6D present data concerning the stability of HIT01-K21Q-R218E. FIG. 6A is SDS-PAGE data obtained at different protein storage buffer conditions. The results indicate the upper band shift between reducing and non-reducing condition is consistent at various buffers. FIG. 6B is the profile of HIT01-K21Q-R218E analyzed on a size exclusion chromatography column. FIG. 6C illustrates the size distribution of HIT01-K21Q-R218E protein analyzed on a dynamic light scattering instrument. FIG. 6D is SDS-PAGE data for fresh HIT01-K21Q-R218E and at one-week intervals for four successive weeks.

[0123] FIG. 7A through 7C present data from a mouse immunization study involving HIT01-K21Q-R218E. FIG. 7A illustrates the immunization scheme. FIG. 7B illustrates serum antibody responses of immunized animals when measured with each immunogen. FIG. 7C illustrates the sera concentration of LDL-C at week 4.

[0124] FIGS. 8A through 8M present data concerning nonhuman primate (NHP) immunization and antibody responses for HIT01-K21Q-R218E. FIG. 8A depicts the study protocol. FIG. 8B depicts data concerning longitudinal serum antibody levels for antibodies against human PCSK9 and HIT01-K21Q-R218E in each animal. FIG. 8C depicts data concerning the anti-HIT-01 or PCSK9 IgG response in response to HIT01-K21Q-R218E injection in NHP. FIG. 8D depicts data concerning the serum LDL levels pre- and post HIT01-K21Q-R218E injection in NHP. FIG. 8E depicts data concerning the serum cholesterol levels pre- and post HIT01-K21Q-R218E injection in NHP. FIG. 8F depicts data concerning the serum HDL levels pre- and post HIT01-K21Q-R218E injection in NHP. FIG. 8G presents pooled data for LDL, HDL, and cholesterol serum levels measured for animals in the NHP study at pre-bleed vs week 2 following the third immunization. FIG. 8H presents pooled data for LDL, HDL, and cholesterol serum levels measured for animals in the NHP study at pre-bleed vs week 2 following the fourth immunization. FIG. 8I presents pooled data for LDL, HDL, and cholesterol serum levels measured for animals in the NHP study pre-bleed vs week 14 to 26 following the third immunization. FIG. 8J presents data comparing pre-bleed t0 vs week 2 following the final immunization. FIG. 8K presents data comparing the average levels pre-bleed week-27 to week-4 vs week 2 following the fourth immunization. FIG. 8L presents data comparing the LDL, HDL, and cholesterol serum levels measured at the third immunization vs week 2 following the third immunization. FIG. 8M presents data comparing the LDL, HDL, and cholesterol serum levels measured at the fourth immunization vs week 2 following the fourth immunization.

[0125] FIG. 9 presents the results of a competition assay using AMG145 demonstrating that immunization in the NHP study elicited antibody responses targeting LDL-R binding sites. The top two panels compare serum probed with HIT01-K21Q-R218E alone or with AMG145, and the bottom two panels compare serum probed with wild type PCSK9 alone or with AMG145.

[0126] FIGS. 10A and 10B graphically represent embodiments of the invention in which an PCSK9 immunogen of the invention is optionally conjugated to an immunogenic carrier. FIG. 10A represents an embodiment in which the immunogenic carrier comprises the tetanus toxoid heavy chain C fragment (rTTHC), and in which a linker is employed to conjugate the PCSK9 immunogen (indicated by an oval) to the carrier (indicated by a rounded rectangle). FIG. 10B represents an embodiment in which the immunogenic carrier comprises a protein nanoparticle, and in which SPYCATCHER/SPYTAGS are employed to conjugate multiple copies of the PCSK9 immunogen of the invention to enable multivalent display of the immunogen on self-assembling nanoparticles.

[0127] FIGS. 11A and 11B graphically illustrate maps of exemplary vectors. FIG. 11A represents HIT01_3CHS in pVRC8400, and FIG. 11B represents HIT01-K12Q-R218E also in pVRC8400.

[0128] FIGS. 12A through 12C present data pertaining to HIT01-Combo3. FIG. 12A presents images of SDS-PAGE analysis. FIG. 12B presents a sequence alignment comparing HIT01-Combo3 with HIT01, with an indication of normal processing and unintended cleavage of HIT01. For proposes of FIG. 12B, the sequence presented for HIT01-Combo3 lacks the C-terminal tag (gglvprgshhhhhhsawshpqfek (SEQ ID NO: 159)) present in SEQ ID NO:85. FIG. 12C depicts data concerning the SEC profile of HIT01-Combo3 (upper right) and binding curves to various antibodies (bottom).

[0129] FIGS. 13A through 13Q present data pertaining to the construction of HIT01 derivative nanoparticle conjugates. FIG. 13A graphically illustrates glycan designs (N-linked sequons) to enhance HIT01-K21Q-R218E nanoparticle solubility. FIG. 13B presents the results of SDS-PAGE gel analysis for purified HIT01-K21Q-R218E 9glycans-SpyT protein. FIG. 13C presents data concerning the elution of HIT01 9 Glycan+SpyT-Encapsulin Spy Catcher from an SEC column. FIG. 13D are electromicrographs reflecting negative staining of HIT01 9 Glycan+SpyT-Encapsulin Spy Catcher conjugates. FIGS. 13E through 13N present data concerning the antibody binding activity of the HIT01-K21Q-R218E 9glycans-encapsulin nanoparticles immunogen (FIGS. 13E through 13I) as compared with HIT01QE (FIGS. 13J through 13N) to various antibodies as stated in the figures. FIGS. 13O through 13Q present data from a mouse immunization study involving the HIT01-K21Q-R218E 9glycans-encapsulin nanoparticles immunogen. FIG. 13O illustrates the immunization scheme for an animal (mouse) study involving HIT01-K21Q-R218E 9glycans-encapsulin nanoparticles immunogens. FIG. 13P illustrates serum antibody responses of immunized animals when measured with each immunogen. FIG. 13Q illustrates the sera concentration of LDL-C at week 4.

### DETAILED DESCRIPTION OF THE INVENTION

[0130] The present disclosure is drawn to immunogens produced by the grafting of epitope residues from human PCSK9 to non-human PCSK9 or PCSK9 structural homologs and elimination of all 9 residue sequence overlaps with human protein to reduce self-targeting response, and methods of using the same that are effective to lower blood cholesterol levels in a mammal and treat dyslipidemias and related disease states in a mammal without the frequency of administration required by passive immunity strategies. In certain aspects, discontinuous human PCSK9 epitopes were preserved in the grafting to non-human PCSK9 or PCSK9 structural homologs. As noted above, in the context of the invention, the grafted “epitope” residues are residues that are part of the recognition site of an antibody that can reduce cholesterol by binding to an epitope in PCSK9.

[0131] As used herein, the term “grafted” refers to attaching one or more linear organic polymer to at least one second linear organic polymer. In certain aspects, a first linear organic polymer can be a polypeptide, for example a PCSK9 homolog, and the second linear organic monomer can be a peptide of human PCSK9. In certain aspects, the grafting can be accomplished by preparing a polynucleotide which codes for a PCSK9 homolog as well as peptides of human PCSK9 along different regions of the same polynucleotide.

[0132] As used herein, the term “polypeptide” refers to a linear organic polymer consisting of 50 or more amino-acid residues bonded together in a chain wherein the amino acid residues are bonded to adjacent residues by a peptide bond.

[0133] As used herein, the term “peptide” refers to a linear organic polymer consisting of less than 50 amino-acid residues bonded together in a chain wherein the amino acid residues are bonded to adjacent residues by a peptide bond.

[0134] As used herein, “sequential residue overlap” refers to a region of comparison between two separate chains of amino acids which share amino acid sequence identity.

[0135] As used herein, “protein” encompasses any polypeptide or peptide.

[0136] As used herein, “homolog” refers to proteins of similar structure. The similarity may be due to shared ancestry, but it not necessarily due to shared ancestry. Thus, homolog as used herein refers to similarity in structure, independent of any phylogenetic relationship between the organisms from which the structures derive or the in vivo biological function of the structures.

[0137] As used herein, “self-targeting response” is a specific adaptive immune response mounted against self-antigens.

[0138] As used herein, “T-cell helper peptide” is any peptide which can enhance T-cell response to an immunogenic composition.

### PCSK9 Immunogens of the Present Disclosure

[0139] In one aspect, the epitope residues from human PCSK9 were grafted to non-human PCSK9 or PCSK9 structural homologs and all 9-residue sequence overlaps with human protein were eliminated to reduce self-targeting response. It was found that some of such epitope-scaffold designs demonstrated antigenicity toward anti-human PCSK9 antibodies similar to wild-type human PCSK9. Such epitope scaffolds were conjugated to common carriers, nanoparticles or nanoparticle-carrier constructs to further enhance immunogenicity.

[0140] In one aspect, the PCSK9 immunogens comprise epitopes of PCSK9 comprising from 4 to 20 amino acids and, when administered to a subject, are able to lower the LDL-cholesterol level in blood of the subject. Preferably, the subject is a mammal, preferably a human. Preferably, the PCSK9 immunogen is able to lower the LDL-cholesterol level by at least 2%, 5%, 10%, 20%, 30%, 50%, or more. In one aspect, the PCSK9 immunogen is a portion of PCSK9, which participates in the interaction of PCSK9 with the LDL receptor. In one aspect, the PCSK9 immunogens is a portion of PCSK9 which has been mutated to change the peptide sequence, which participates in the interaction of PCSK9 with the LDL receptor.

[0141] In one aspect, an immunogen of the present disclosure comprises grafting of human PCSK9 antibody epitopes to iridescent shark PCSK9 and removing all 9-residue sequence overlaps with human proteins, e.g. SEQ ID NO: 1 (Table 1).

[0142] In another aspect, an immunogen of the present disclosure comprises grafting of human PCSK9 antibody epitopes to iridescent shark PCSK9 and removing all 9-residue sequence overlaps with human proteins and further inserting at least one HRV-3C cleavage site to remove the C-terminal domain, e.g. SEQ ID NOs: 2-5 (Table 2).

[0143] In another aspect, an immunogen of the present disclosure comprises grafting of human PCSK9 antibody epitopes to iridescent shark PCSK9 and removing all 9-residue sequence overlaps with human proteins and further inserting at least one HRV-3C cleavage site to remove the C-terminal domain and flanking the cleavage site with the peptide sequence gly-ser-gly, e.g. SEQ ID NOs: 6-9 (Table 2).

[0144] In yet another aspect, an immunogen of the present disclosure comprises grafting of human PCSK9 antibody epitopes to iridescent shark PCSK9 and removing all 9-residue sequence overlaps with human proteins and adding a T-cell help peptide from tetanus toxoid to C-terminal, e.g. SEQ ID NOs: 10-12 (Table 3).

[0145] In another aspect, an immunogen of the present disclosure comprises grafting of human PCSK9 antibody epitopes to iridescent shark PCSK9 and removing all 9-residue sequence overlaps with human proteins and introducing mutations in the peptide sequence to reduce non-specific cleavage, e.g. SEQ ID NOs: 13-14 (Table 4). These two nonlimiting examples are also identified as HIT01-K21Q-R218Q (SEQ ID NO:13) and HIT01-K21Q-R218E (SEQ ID NO:14).

[0146] In another aspect, an immunogen of the present disclosure comprises grafting of human PCSK9 antibody epitopes to iridescent shark PCSK9 and removing all 9-residue sequence overlaps with human proteins and modifying the catalytic site of PCSK9, and optionally truncating the N-terminal, e.g. SEQ ID NOs: 15-24 (Table 4).

[0147] In another aspect, an immunogen of the present disclosure comprises grafting of human PCSK9 antibody epitopes to iridescent shark PCSK9 and removing all 9-residue sequence overlaps with human proteins and modifying the putative cleavage site in the loop region of PCSK9 by introducing mutations in the peptide sequence of PCSK9, e.g. SEQ ID NOs: 25-29 (Table 4), and SEQ ID NO: 93 (Table 9).

[0148] In yet another aspect, an immunogen of the present disclosure comprises grafting of human PCSK9 antibody epitopes to iridescent shark PCSK9 and removing all 9-residue sequence overlaps with human proteins and inactivating PCSK9 by mutation D186, and adding a Furin cleavage site to make sure PCSK9 cleaves correctly, e.g. SEQ ID NOs: 30-37 (Table 4).

[0149] In yet another aspect, an immunogen of the present disclosure comprises grafting of human PCSK9 antibody epitopes to iridescent shark PCSK9 and removing all 8-residue sequence overlaps with human proteins, e.g. SEQ ID NOs: 38-53 (Table 5).

[0150] In another aspect, an immunogen of the present disclosure comprises grafting of human PCSK9 antibody epitopes to iridescent shark PCSK9 and removing all 8-residue sequence overlaps with human proteins comprising identifying a single mutation to remove one such 8-residue sequence overlap, e.g. SEQ ID NOs: 54-63, 73-84 (Table 5).

[0151] In another aspect, an immunogen of the present disclosure comprises identifying an alternative PCSK9 homologous sequence and removing all 9-residue sequence overlaps with human proteins, e.g. SEQ ID NO: 64 (Table 5).

[0152] In another aspect, an immunogen of the present disclosure comprises identifying an alternative PCSK9 homologous sequence and removing all 9-residue and 8-residue sequence overlaps with human proteins, e.g. SEQ ID NO: 65 (Table 5).

[0153] In another aspect, an immunogen of the present disclosure comprises identifying an alternative PCSK9 homologous sequence and removing some or all 8-residue sequence overlaps with human proteins, e.g. SEQ ID NOs: 66-70, 85-86 (Table 5).

[0154] In another aspect, an immunogen of the present disclosure comprises grafting of human PCSK9 antibody epitopes to iridescent shark PCSK9 and removing four of six identical 8-residue sequence overlaps with human proteins, e.g. SEQ ID NOs: 71-72 (Table 5).

[0155] In yet another aspect, an immunogen of the present disclosure comprises grafting of human PCSK9 antibody epitopes to iridescent shark PCSK9 and modifying the calcium binding loop to stabilize PCSK9, e.g. SEQ ID NOs: 87-89 (Table 6).

[0156] In a further aspect, an immunogen of the present disclosure comprises grafting of human PCSK9 antibody epitopes to iridescent shark PCSK9 and inserting an inhibitory peptide to reduce catalytic activity, e.g. SEQ ID NOs: 90-91 (Table 7).

[0157] In another aspect, an immunogen of the present disclosure comprises grafting of human PCSK9 antibody epitopes to iridescent shark PCSK9 and attaching an immunogenic carrier rTTHc, e.g. SEQ ID NOs: 92 (Table 8).

[0158] In another aspect, an immunogen of the present disclosure comprises grafting of human PCSK9 antibody epitopes to channel catfish PCSK9, blackrock cod PCSK9, climbing perch PCSK9, pupfish PCSK9, cold adapted subtilisin-like serine proteinase, keratinase from Meiothermus taiwanensis WR-220e, Proteinase K like enzyme from a psychrotroph Serratia, Cuticle-Degrading Protease from Paecilomyces lilacinus, serine protease from an extreme thermophile, Thermus aquaticus YT-1, or keratinase from Meiothermus taiwanensis WR-220e and removing all 9-residue sequence overlaps with human proteins, e.g. SEQ ID NOs: 94-107 (Table 9).

[0159] In another aspect, an immunogen of the present disclosure comprises grafting of human PCSK9 antibody epitopes to iridescent shark PCSK9 and removing all 9-residue sequence overlaps with human proteins, introducing mutations in the peptide sequence to facilitate N-linked glycosylation, and optionally introducing mutations in the peptide sequence to reduce non-specific cleavage, e.g. SEQ ID NOs: 123-146 (Table 11).

[0160] Such PCSK9 immunogens may be used alone or in combination, preferably when conjugated to an immunogenic carrier, to induce auto anti-PCSK9 antibodies in a subject in order to treat, prevent or ameliorate PCSK9-related disorders. The ability of the immunogenic PCSK9 immunogens of the invention to induce auto anti-PCSK9 antibodies may be measured in mice, using the test disclosed in Example 6 of the present application. The ability of auto-antibodies induced by the antigenic PCSK9 peptide of the invention to decrease the level of circulating plasma cholesterol may be measured in mice using the Roche Cobas 6000 c501 automated chemistry analyzer. The term “PCSK9 immunogen biological activity”, when used herein, refers to the ability of the antigenic PCSK9 peptides of the invention to induce auto anti-PCSK9 antibodies in a patient.

[0161] Vaccine constructs of the present disclosure, when administered to a subject, are able to lower the LDL-cholesterol level in blood of the subject. Preferably, the subject is a mammal, preferably a human. Preferably, the vaccine construct is able to lower the LDL-cholesterol level by at least 2%, 5%, 10%, 20%, 30%, 50%, or more.

[0162] In certain aspects, PCSK9 immunogens may be used alone or in combination to induce anti-PCSK9 antibodies in a subject in order to treat, prevent or ameliorate cancer. In certain aspects, the PCSK9 immunogens disclosed herein can be administered to a subject together with at least one cancer therapeutic agent. In certain aspects, the PCSK9 immunogens disclosed herein can be administered to a subject to potentiate immune checkpoint therapy.

[0163] PCSK9 immunogens can be further modified by amino acids, especially at the N- and C-terminal ends to allow the antigenic PCSK9 peptide to be conformationally-constrained and/or to allow coupling of the antigenic PCSK9 peptide to an immunogenic carrier after appropriate chemistry has been carried out.

[0164] The PCSK9 immunogens disclosed herein encompass functionally active variant peptides derived from the amino acid sequence of PCSK9 in which amino acids have been deleted, inserted or substituted without essentially detracting from the immunological properties thereof, i.e. such functionally active variant peptides retain a substantial antigenic PCSK9 peptide biological activity.

[0165] In one aspect, such functionally active variant peptides exhibit at least 60%, 65%, 70%, 75%, 80%, 85%, 90% or 95% identity to any one of SEQ ID NOs: 1-146.

[0166] Sequence similarity for polypeptides, which is also referred to as sequence identity, is typically measured using sequence analysis software. Protein analysis software matches similar sequences using measures of similarity assigned to various substitutions, deletions and other modifications, including conservative amino acid substitutions. For instance, GCG contains programs such as “Gap” and “Bestfit” which can be used with default parameters to determine sequence homology or sequence identity between closely related polypeptides, such as homologous polypeptides from different species of organisms or between a wild-type protein and a mutein thereof. See, e.g., GCG Version 6.1. Polypeptide sequences also can be compared using FASTA using default or recommended parameters. A program in GCG Version 6.1. FASTA (e.g., FASTA2 and FASTA3) provides alignments and percent sequence identity of the regions of the best overlap between the query and search sequences (Pearson, Methods Enzymol. 183:63-98 (1990): Pearson, Methods Mol. Biol. 132:185-219 (2000)). An alternative algorithm when comparing a sequence of the invention to a database containing a large number of sequences from different organisms is the computer program BLAST, especially blastp or tblastn, using default parameters. See, e.g., Altschul et al., J. Mol. Biol. 215:403-410 (1990): Altschul et al., Nucleic Acids Res. 25:3389-402 (1997).

[0167] Included in the scope of the aspects of the invention are functional variants of the inventive polypeptides or proteins described herein. The term “functional variant” as used herein refers to a polypeptide or protein having substantial or significant sequence identity or similarity to a parent polypeptide or protein, which functional variant retains the biological activity of the polypeptide or protein of which it is a variant. Functional variants encompass, for example, those variants of the polypeptide or protein described herein (the parent polypeptide or protein) that retain the ability to be recognized by PCSK9 antibodies to a similar extent, the same extent, or to a higher extent, as the parent polypeptide or protein. In reference to the parent polypeptide or protein, the functional variant can, for instance, be at least about 30%, about 50%, about 75%, about 80%, about 85%, about 90%, about 91%, about 92%, about 93%, about 94%, about 95%, about 96%, about 97%, about 98%, about 99% or more identical in amino acid sequence to the parent polypeptide or protein.

[0168] Functionally active variants comprise naturally occurring functionally active variants such as allelic variants and species variants and non-naturally occurring functionally active variants that can be produced by, for example, mutagenesis techniques or by direct synthesis.

[0169] A functional variant can, for example, comprise the amino acid sequence of the parent polypeptide or protein with at least one conservative amino acid substitution. Alternatively or additionally, the functional variants can comprise the amino acid sequence of the parent polypeptide or protein with at least one non-conservative amino acid substitution. In this case, it is preferable for the non-conservative amino acid substitution to not interfere with or inhibit the biological activity of the functional variant. The non-conservative amino acid substitution may enhance the biological activity of the functional variant, such that the biological activity of the functional variant is increased as compared to the parent polypeptide or protein.

[0170] Methods of introducing a mutation into amino acids of a protein are well known to those skilled in the art. See, e.g., Ausubel (ed.), Current Protocols in Molecular Biology, John Wiley and Sons, Inc. (2003): T. Maniatis, E. F. Fritsch and J. Sambrook, Molecular Cloning: A Laboratory Manual, Cold Spring Harbor laboratory, Cold Spring Harbor, N.Y. (2012).

[0171] Mutations can also be introduced using commercially available kits such as “QUIKCHANGE™ SITE-DIRECTED MUTAGENESIS KIT” (STRATAGENE™) or directly by peptide synthesis. The generation of a functionally active variant to an antigenic PCSK9 peptide by replacing an amino acid which does not significantly influence the function of the antigenic PCSK9 peptide can be accomplished by one skilled in the art.

[0172] Amino acid substitutions of the inventive polypeptides or proteins are preferably conservative amino acid substitutions. Conservative amino acid substitutions are known in the art, and include amino acid substitutions in which one amino acid having certain physical and/or chemical properties is exchanged for another amino acid that has the same or similar chemical or physical properties. For instance, the conservative amino acid substitution can be an acidic/negatively charged polar amino acid substituted for another acidic/negatively charged polar amino acid (e.g., Asp or Glu), an amino acid with a nonpolar side chain substituted for another amino acid with a nonpolar side chain (e.g., Ala, Gly, Val, Ile, Leu, Met, Phe, Pro, Trp, Cys, Val, etc.), a basic/positively charged polar amino acid substituted for another basic/positively charged polar amino acid (e.g. Lys, His, Arg, etc.), an uncharged amino acid with a polar side chain substituted for another uncharged amino acid with a polar side chain (e.g., Asn, Gln, Ser, Thr, Tyr, etc.), an amino acid with a beta-branched side-chain substituted for another amino acid with a beta-branched side-chain (e.g., Ile, Thr, and Val), an amino acid with an aromatic side-chain substituted for another amino acid with an aromatic side chain (e.g., His, Phe, Trp, and Tyr), etc.

[0173] Examples of groups of amino acids that have side chains with similar chemical properties include 1) aliphatic side chains: glycine, alanine, valine, leucine, and isoleucine: 2) aliphatic-hydroxyl side chains: serine and threonine: 3) amide-containing side chains: asparagine and glutamine: 4) aromatic side chains: phenylalanine, tyrosine, and tryptophan: 5) basic side chains: lysine, arginine, and histidine: 6) acidic side chains: aspartic acid and glutamic acid: and 7) sulfur-containing side chains: cysteine and methionine. Preferred conservative amino acids substitution groups are: valine-leucine-isoleucine, phenylalanine-tyrosine, lysine-arginine, alanine-valine, glutamate-aspartate, and asparagine-glutamine.

[0174] The polypeptide or protein can consist essentially of the specified amino acid sequence or sequences described herein, such that other components, e.g., other amino acids, do not materially change the biological activity of the polypeptide, protein, functional portion, or functional variant.

[0175] The polypeptides or proteins of aspects of the invention (including functional portions and functional variants) can be of any length, i.e., can comprise any number of amino acids, provided that the polypeptides or proteins (or functional portions or functional variants thereof) retain their biological activity, e.g., antigenicity toward human PCSK9 antibodies. For example, the polypeptide or protein can be about 50 to about 5,000 amino acids long, such as 50, 70, 75, 100, 125, 150, 175, 200, 300, 400, 500, 600, 700, 800, 900, 1,000, or more amino acids in length.

[0176] The polypeptides or proteins of aspects of the invention (including functional portions and functional variants of the invention) can comprise synthetic amino acids in place of one or more naturally-occurring amino acids. Such synthetic amino acids are known in the art, and include, for example, aminocyclohexane carboxylic acid, norleucine, α-amino n-decanoic acid, homoserine, S-acetylaminomethyl-cysteine, trans-3- and trans-4-hydroxy proline, 4-aminophenylalanine, 4-nitrophenylalanine, 4-chlorophenylalanine, 4-carboxyphenylalanine, β-phenylserine β-hydroxyphenylalanine, phenylglycine, α-naphthylalanine, cyclohexylalanine, cyclohexylglycine, indoline-2-carboxylic acid, 1,2,3,4-tetrahydroisoquinoline-3-carboxylic acid, aminomalonic acid, aminomalonic acid monoamide, N′-benzyl-N′-methyl-lysine, N′, N′-dibenzyl-lysine, 6-hydroxylysine, ornithine, α-aminocyclopentane carboxylic acid, α-aminocyclohexane carboxylic acid, α-aminocycloheptane carboxylic acid, α-(2-amino-2-norbornane)-carboxylic acid, α, γ-diaminobutyric acid, α,β-diaminopropionic acid, homophenylalanine, and α-tert-butylglycine.

[0177] The polypeptides or proteins of aspects of the invention (including functional portions and functional variants) can be glycosylated, amidated, carboxylated, phosphorylated, esterified, N-acylated, cyclized via, e.g., a disulfide bridge, or converted into an acid addition salt and/or optionally dimerized or polymerized. Alternatively, in preferred embodiments, the polypeptides or proteins of aspects of the invention (including functional portions and functional variants) can be engineered to eliminate or reduce glycosylation, amidation, carboxylation, phosphorylation, esterification, N-acylatation, cyclization, etc. In one example, an embodiment of the invention includes a sequence, such as set forth herein, modified to remove N-linked glycosylation. For example, see SEQ ID Nos:96, 98, 99-101, 103-107; similar amino acid substitutions can be made to other embodiments of the polypeptides or proteins of aspects of the invention to remove sites for N-linked glycosylation.

[0178] The polypeptides or proteins of aspects of the invention (including functional portions and functional variants thereof) can be obtained by methods known in the art. The polypeptides or proteins may be made by any suitable method of making polypeptides or proteins. Also, polypeptides and proteins can be recombinantly produced using the nucleic acids described herein using standard recombinant methods. See, e.g., Ausubel et al., supra. Further, some of the polypeptides or proteins of the aspects of the invention (including functional portions and functional variants thereof) can be isolated and/or purified from a source, such as a plant, a bacterium, an insect, a mammal, e.g., a rat, a human, etc. Methods of isolation and purification are well-known in the art. Alternatively, the polypeptides or proteins described herein (including functional portions and functional variants thereof) can be synthesized by any of a variety of commercial entities. In this respect, the inventive polypeptides or proteins can be synthetic, recombinant, isolated, and/or purified.

[0179] PCSK9 immunogens of the present disclosure can also comprise those that arise as a result of the existence of multiple genes, alternative transcription events, alternative RNA splicing events, and alternative translational and postranslational events. A peptide can be expressed in systems, e.g. cultured cells, which result in substantially the same postranslational modifications present as when the peptide is expressed in a native cell, or in systems that result in the alteration or omission of postranslational modifications, e.g. glycosylation or cleavage, present when expressed in a native cell.

[0180] A PCSK9 immunogen of the present disclosure can be produced as a fusion protein that contains other non-PCSK9 or non-PCSK9-derived amino acid sequences, such as amino acid linkers or signal sequences or immunogenic carriers as defined herein, as well as ligands useful in protein purification, such as glutathione-S-transferase, histidine tag, and staphylococcal protein A. More than one PCSK9 immunogen of the disclosure can be present in a fusion protein. The heterologous polypeptide can be fused, for example, to the N-terminus or C-terminus of the peptide of the invention. A peptide of the present disclosure can also be produced as fusion proteins comprising homologous amino acid sequences, i.e., other PCSK9 or PCSK9-derived sequences.

[0181] The PCSK9 immunogen of the present disclosure might be linear or conformationally constrained. As used herein in reference to a peptide, the term “conformationally constrained” means a peptide, in which the three-dimensional structure is maintained substantially in one spatial arrangement over time. Conformationally constrained molecules can have improved properties such as increased affinity, metabolic stability, membrane permeability or solubility.

[0182] In addition, such conformationally constrained peptides are expected to present the antigenic PCSK9 epitope in a conformation similar to their native loop conformation, thereby inducing anti-PCSK9 antibodies more susceptible to recognize intact, native self PCSK9 molecules or with an increased affinity to recognize self PCSK9 molecules. Methods of conformational constraint are well known in the art and include, without limitation, bridging and cyclization.

[0183] Several approaches are known in the art to introduce conformational constraints into a linear peptide. For example, bridging between two neighboring amino acids in a peptide leads to a local conformational modification, the flexibility of which is limited in comparison with that of regular peptides.

[0184] “Nucleic acid” as used herein includes “polynucleotide,” “oligonucleotide,” and “nucleic acid molecule,” and generally means a polymer of DNA or RNA, which can be single-stranded or double-stranded, synthesized or obtained (e.g., isolated and/or purified) from natural sources, which can contain natural, non-natural or altered nucleotides, and which can contain a natural, non-natural or altered internucleotide linkage, such as a phosphoroamidate linkage or a phosphorothioate linkage, instead of the phosphodiester found between the nucleotides of an unmodified oligonucleotide. In some aspects, the nucleic acid does not comprise any insertions, deletions, inversions, and/or substitutions. However, it may be suitable in some instances, as discussed herein, for the nucleic acid to comprise one or more insertions, deletions, inversions, and/or substitutions. In some aspects, the nucleic acid may encode additional amino acid sequences that do not affect the function of the polypeptide or protein and which may or may not be translated upon expression of the nucleic acid by a host cell. In an aspect of the invention, the nucleic acid is complementary DNA (cDNA). In an aspect of the invention, the nucleic acid comprises a codon-optimized nucleotide sequence.

[0185] The nucleic acids of an aspect of the invention may be recombinant. As used herein, the term “recombinant” refers to (i) molecules that are constructed outside living cells by joining natural or synthetic nucleic acid segments to nucleic acid molecules that can replicate in a living cell, or (ii) molecules that result from the replication of those described in (i) above. For purposes herein, the replication can be in vitro replication or in vivo replication.

[0186] The nucleic acids can consist essentially of the specified nucleotide sequence or sequences described herein, such that other components, e.g., other nucleotides, do not materially change the biological activity of the encoded polypeptide, protein, PCSK9 immunogens, functional portion, or functional variant.

[0187] A recombinant nucleic acid may be one that has a sequence that is not naturally occurring or has a sequence that is made by an artificial combination of two otherwise separated segments of sequence. This artificial combination is often accomplished by chemical synthesis or, more commonly, by the artificial manipulation of isolated segments of nucleic acids, e.g., by genetic engineering techniques. The nucleic acids can be constructed based on chemical synthesis and/or enzymatic ligation reactions using procedures known in the art. See, for example, Ausubel et al., supra. For example, a nucleic acid can be chemically synthesized using naturally occurring nucleotides or variously modified nucleotides designed to increase the biological stability of the molecules or to increase the physical stability of the duplex formed upon hybridization (e.g., phosphorothioate derivatives and acridine substituted nucleotides). Examples of modified nucleotides that can be used to generate the nucleic acids include, but are not limited to, 5-fluorouracil, 5-bromouracil, 5-chlorouracil, 5-iodouracil, hypoxanthine, xanthine, 4-acetylcytosine, 5-(carboxy hydroxy methyl) uracil, 5-carboxy methylaminomethyl-2-thiouridine, 5-carboxy methylaminomethyluracil, dihydrouracil, beta-D-galactosylqueosine, inosine, N⁶-isopentenyladenine, 1-methylguanine, 1-methylinosine, 2,2-dimethylguanine, 2-methyladenine, 2-methylguanine, 3-methylcytosine, 5-methylcytosine, N⁶-substituted adenine, 7-methylguanine, 5-methylaminomethyluracil, 5-methoxyaminomethyl-2-thiouracil, beta-D-mannosylqueosine, 5′-methoxy carboxymethyluracil, 5-methoxyuracil, 2-methylthio-N⁶-isopentenyladenine, uracil-5-oxyacetic acid (v), wybutoxosine, pseudouracil, queosine, 2-thiocytosine, 5-methyl-2-thiouracil, 2-thiouracil, 4-thiouracil, 5-methyluracil, uracil-5-oxyacetic acid methylester, 3-(3-amino-3-N-2-carboxypropyl) uracil. and 2.6-diaminopurine. Alternatively, one or more of the nucleic acids of the aspects of the invention can be purchased from any of a variety of commercial entities.

[0188] The nucleic acid can comprise any isolated or purified nucleotide sequence which encodes any of the polypeptides. proteins. PCSK9 immmunogens. conjugates. or functional portions or functional variants thereof disclosed herein. By way of non-limiting examples. a nucleic acid encoding HIT01 is

ATGCATCTGGTGCTGGTGCTGTGTCTGGCTGCCCTGGCCGCCTGTGATTACAGCG AGGACAAAGAAGTGAAGGCCCCTCAGCTGGATCACCCCGATCCTGGAACAGAGA GAGTGGCCGAGCTGCTGAGATGCACCAAGAGCGTTTGGAGAATCCCCGAGCAGT ACCTGGTGGTGCTGAGAGAGGGCACCAGAGATAGCCACGTGCAGAGAACCGTGT CTACCCTGAGAGCCCAGGCCGCTAGAAGAGGACACGCCATCCACATCATGCACA CCTACAGCGGCGTGTTCCACGGCTTTCTGATCAAGATGAGCAGCGAGGTGCTGCC CATGGCTCTGAAACTGCCTCACGTGGCCTACATCGAAGAGGACTCCTCTATCTTC GCCCAGAGCATCCCCTGGAACCTGCAGAGAATCATCCAGACCAAGCACGAGACA GGCAAGTACACCCCTCCTAACGATGGCGCCCAAGTGACCGTGTTCCTGCTGGATA CAAGCGTGCAGACCGACCACCGGGAAATCGAGGGCAAAGTGATGGTCACCGACT TCAACAGCATGCCCAAAGAGGACGGCACCCGGTTTCACAGATCTGCCAGCAAGT GTGAAAGCCACGGCACCCATATTGCCGGCGTGCTGTCTGGAAGAGATGCTGGCG TTGCAAGAGGCGTGTCCGTGAATACCGTGCGGGTGCTGAATTGCCAAGGCAGAG GAACAGTGTCAGGCGCTCTGGCCGGACTCGAGTATATCAGAGCCAGTCTGCAGG CCCAGCCTGTGTCTCCCGTGATCATCCTGCTGCCTTTCGTCGGCGGCTTCAGCAGA ACACTGAACACCGCCTGTCGCGAGATGGTGCATTCTGGCGCTGTGCTGATTGCCG CCGCTGGCAACTATCAGGACGACGCCTGTATGTACAGCCCCGCCTCTGAGCCTGA AGTGATCACAGTGGGAGCCAGCAACGCCGCCGATAGACCTCTCAGCTCTGGCAC CACAGGCACCAATCTGGGCAGATGCGTGGACGTTTTCGCCCCTGGCGAGGATATC ATCAGCGCCTCTGGCGATTGCAGCACCTGTTTCGTGTCTATGAGCGGCACCTCTC AGAGCGCTGCACATGCCGCTGGAATTGCTGCCGTCCTGCTGAACGCCTATCCTTC TGCTTCTCCCGCCGAAGTGCTGCAGCTGCTCAGATATCACGCTGTGCAGAGAGTG ATCAACCCCGACTCTCTGCCTCCTGAGCACTACCTGACCACACCTGATATGGTGG CCGCTCTGCCTACATCTGCCGCCACAGGCGAAAAGCTGCTGTGTAGAAGCGTGTG GTCCAAGAGAAGCGGCGTGGGCAGCTTTGATACAGCCGTGGCCAGATGCAGACA CGGCGAGGAAATGTTCAGCTGCTCCAGCTACAGCCCCAATGGCGTTCACGCCGG CGAGAGAATCGAGATCAGAGATGGCCAGAAAGTGTGCGAGGCCCACCACGGAA TTGGAGGACAAGGCGTGTACGCCGTGGCTAGGTGTTGTACAGGCAGCAGAGTGA AGTGTCACGCCTCTGCCTCACTGCATGTGGGCATTGATGCCGAGTGTCCCAGCCA AGAGTTTCAGCTGACCGGCTGCAGCAGCCACTACATCAGATCCCAGGATGTGGCT CAGCCCAGCTGGCCACTGCACAGCAATAGAAAAGCCTGTCCTGCCGGCGAAGGC GGAACAAGCCATGCCTTTTGTTGTCACGCCCCTAACCTGGAATGCCACCTGATCG AACACCACCAGAGCGAGTTCACCAAACAGGTGGAAGTGTCCTGCGAGGACAGCT GGACCCTGACAGGCTGTAATGCCGTGTCTCACGGCTCTGTGACCCATGCCGCTTA CACCAGAGGCAATACCTGCGTGATCCAGATGTTCGGCGGCGATAAGGGCGCTGC CGCCATTGCCATCTGCTGCAGATACAGACCCCTGGACCAGCAGTCCAACAACAA CCACGAGCAGAATACCGGCGGACTGGAAGTGCTGTTTCAAGGCCCTGGACACCA CCACCATCACCACTCTGCTTGGAGCCATCCTCAGTTCGAGAAGtgatga (SEQ ID NO:150), and a nucleic acid encoding HIT01-K21Q-R218E is ATGCATCTGGTGCTGGTGCTGTGTCTGGCTGCCCTGGCCGCCTGTGATTACAGCG AGGACCAGGAAGTGAAGGCCCCTCAGCTGGATCACCCCGATCCTGGAACAGAGA GAGTGGCCGAGCTGCTGAGATGCACCAAGAGCGTTTGGAGAATCCCCGAGCAGT ACCTGGTGGTGCTGAGAGAGGGCACCAGAGATAGCCACGTGCAGAGAACCGTGT CTACCCTGAGAGCCCAGGCCGCTAGAAGAGGACACGCCATCCACATCATGCACA CCTACAGCGGCGTGTTCCACGGCTTTCTGATCAAGATGAGCAGCGAGGTGCTGCC CATGGCTCTGAAACTGCCTCACGTGGCCTACATCGAAGAGGACTCCTCTATCTTC GCCCAGAGCATCCCCTGGAACCTGCAGAGAATCATCCAGACCAAGCACGAGACA GGCAAGTACACCCCTCCTAACGATGGCGCCCAAGTGACCGTGTTCCTGCTGGATA CAAGCGTGCAGACCGACCACCGGGAAATCGAGGGCAAAGTGATGGTCACCGACT TCAACAGCATGCCCAAAGAGGACGGCACCCGGTTTCACGAGTCTGCCAGCAAGT GTGAAAGCCACGGCACCCATATTGCCGGCGTGCTGTCTGGAAGAGATGCTGGCG TTGCAAGAGGCGTGTCCGTGAATACCGTGCGGGTGCTGAATTGCCAAGGCAGAG GAACAGTGTCAGGCGCTCTGGCCGGACTCGAGTATATCAGAGCCAGTCTGCAGG CCCAGCCTGTGTCTCCCGTGATCATCCTGCTGCCTTTCGTCGGCGGCTTCAGCAGA ACACTGAACACCGCCTGTCGCGAGATGGTGCATTCTGGCGCTGTGCTGATTGCCG CCGCTGGCAACTATCAGGACGACGCCTGTATGTACAGCCCCGCCTCTGAGCCTGA AGTGATCACAGTGGGAGCCAGCAACGCCGCCGATAGACCTCTCAGCTCTGGCAC CACAGGCACCAATCTGGGCAGATGCGTGGACGTTTTCGCCCCTGGCGAGGATATC ATCAGCGCCTCTGGCGATTGCAGCACCTGTTTCGTGTCTATGAGCGGCACCTCTC AGAGCGCTGCACATGCCGCTGGAATTGCTGCCGTCCTGCTGAACGCCTATCCTTC TGCTTCTCCCGCCGAAGTGCTGCAGCTGCTCAGATATCACGCTGTGCAGAGAGTG ATCAACCCCGACTCTCTGCCTCCTGAGCACTACCTGACCACACCTGATATGGTGG CCGCTCTGCCTACATCTGCCGCCACAGGCGAAAAGCTGCTGTGTAGAAGCGTGTG GTCCAAGAGAAGCGGCGTGGGCAGCTTTGATACAGCCGTGGCCAGATGCAGACA CGGCGAGGAAATGTTCAGCTGCTCCAGCTACAGCCCCAATGGCGTTCACGCCGG CGAGAGAATCGAGATCAGAGATGGCCAGAAAGTGTGCGAGGCCCACCACGGAA TTGGAGGACAAGGCGTGTACGCCGTGGCTAGGTGTTGTACAGGCAGCAGAGTGA AGTGTCACGCCTCTGCCTCACTGCATGTGGGCATTGATGCCGAGTGTCCCAGCCA AGAGTTTCAGCTGACCGGCTGCAGCAGCCACTACATCAGATCCCAGGATGTGGCT CAGCCCAGCTGGCCACTGCACAGCAATAGAAAAGCCTGTCCTGCCGGCGAAGGC GGAACAAGCCATGCCTTTTGTTGTCACGCCCCTAACCTGGAATGCCACCTGATCG AACACCACCAGAGCGAGTTCACCAAACAGGTGGAAGTGTCCTGCGAGGACAGCT GGACCCTGACAGGCTGTAATGCCGTGTCTCACGGCTCTGTGACCCATGCCGCTTA CACCAGAGGCAATACCTGCGTGATCCAGATGTTCGGCGGCGATAAGGGCGCTGC CGCCATTGCCATCTGCTGCAGATACAGACCCCTGGACCAGCAGTCCAACAACAA CCACGAGCAGAATACCGGCGGACTGGTGCCCAGGGGCAGCCACCACCACCATCA CCACTCTGCTTGGAGCCATCCTCAGTTCGAGAAGTGATGA (SEQ ID NO:151). Alternatively, the nucleotide sequence can comprise a nucleotide sequence which is degenerate to any of the sequences or a combination of degenerate sequences.

[0189] An aspect of the invention also provides an isolated or purified nucleic acid comprising a nucleotide sequence which is complementary to the nucleotide sequence of any of the nucleic acids described herein or a nucleotide sequence which hybridizes under stringent conditions to the nucleotide sequence of any of the nucleic acids described herein.

[0190] The nucleotide sequence which hybridizes under stringent conditions may hybridize under high stringency conditions. By “high stringency conditions” is meant that the nucleotide sequence specifically hybridizes to a target sequence (the nucleotide sequence of any of the nucleic acids described herein) in an amount that is detectably stronger than non-specific hybridization. High stringency conditions include conditions which would distinguish a polynucleotide with an exact complementary sequence, or one containing only a few scattered mismatches from a random sequence that happened to have a few small regions (e.g., 3-10 bases) that matched the nucleotide sequence. Such small regions of complementarity are more easily melted than a full-length complement of 14-17 or more bases, and high stringency hybridization makes them easily distinguishable. Relatively high stringency conditions would include, for example, low salt and/or high temperature conditions, such as provided by about 0.02-0.1 M NaCl or the equivalent, at temperatures of about 50-70° C. Such high stringency conditions tolerate little, if any, mismatch between the nucleotide sequence and the template or target strand, and are particularly suitable for detecting expression of any of the inventive polypeptides, proteins, PCSK9 immunogens, conjugates, or functional portions or functional variants thereof. It is generally appreciated that conditions can be rendered more stringent by the addition of increasing amounts of formamide.

[0191] The aspects of the invention also provide a nucleic acid comprising a nucleotide sequence that is at least about 70% or more, e.g., about 80%, about 90%, about 91%, about 92%, about 93%, about 94%, about 95%, about 96%, about 97%, about 98%, or about 99% identical to any of the nucleic acids described herein.

[0192] In an aspect, the nucleic acids of the aspects of the invention can be incorporated into a recombinant expression vector. In this regard, an aspect of the invention provides recombinant expression vectors comprising any of the nucleic acids of the invention. For purposes herein, the term “recombinant expression vector” means a genetically-modified oligonucleotide or polynucleotide construct that permits the expression of an mRNA, protein, polypeptide, or peptide by a host cell, when the construct comprises a nucleotide sequence encoding the mRNA, protein, polypeptide, or peptide, and the vector is contacted with the cell under conditions sufficient to have the mRNA, protein, polypeptide, or peptide expressed within the cell. The vectors of the aspects of the invention are not naturally-occurring as a whole. However, parts of the vectors can be naturally-occurring. The inventive recombinant expression vectors can comprise any type of nucleotides, including, but not limited to DNA and RNA, which can be single-stranded or double-stranded, synthesized or obtained in part from natural sources, and which can contain natural, non-natural or altered nucleotides. The recombinant expression vectors can comprise naturally-occurring or non-naturally-occurring internucleotide linkages, or both types of linkages. Preferably, the non-naturally occurring or altered nucleotides or internucleotide linkages do not hinder the transcription or replication of the vector.

[0193] In an aspect, the recombinant expression vector can be any suitable recombinant expression vector, and can be used to transform or transfect any suitable host cell. Suitable vectors include those designed for propagation and expansion or for expression or both, such as plasmids and viruses. The vector can be selected from the group consisting of the pUC series (FERMENTAS LIFE SCIENCES, Glen Burnie, MD), the pBluescript series (STRATAGENE, LaJolla, CA), the pET series (NOVAGEN, Madison, WI), the pGEX series (PHARMACIA BIOTECH, Uppsala, Sweden), and the pEX series (CLONTECH, Palo Alto, CA). Nonlimiting examples of two vectors suitable for expressing HIT01 and HIT01-K21Q-R218E, respectively, based on pVRC8400, are diagrammed in FIGS. 11A and 11B, based on pVRC8400. Bacteriophage vectors, such as λGT10, λGT11, λZapII (STRATAGENE), λEMBL4, and λNM1149, also can be used. Examples of plant expression vectors include pBI01, pBI101.2, pBI101.3, pBI121 and pBIN19 (CLONTECH). Examples of animal expression vectors include pEUK-Cl, pMAM, and pMAMneo (CLONTECH). The recombinant expression vector may be a viral vector, e.g., a retroviral vector.

[0194] A number of transfection techniques are generally known in the art. Transfection methods include calcium phosphate co-precipitation, direct micro injection into cultured cells, electroporation, liposome mediated gene transfer, lipid mediated transduction, and nucleic acid delivery using high velocity microprojectiles.

[0195] In an aspect, the recombinant expression vectors can be prepared using standard recombinant DNA techniques described in, for example, Ausubel et al., supra. Constructs of expression vectors, which are circular or linear, can be prepared to contain a replication system functional in a prokaryotic or eukaryotic host cell. Replication systems can be derived, e.g., from ColEl, 2μ plasmid, λ, SV40, bovine papilloma virus, and the like.

[0196] The recombinant expression vector may comprise regulatory sequences, such as transcription and translation initiation and termination codons, which are specific to the type of host cell (e.g., bacterium, fungus, plant, or animal) into which the vector is to be introduced, as appropriate, and taking into consideration whether the vector is DNA- or RNA-based. The recombinant expression vector may comprise restriction sites to facilitate cloning.

[0197] The recombinant expression vector can include one or more marker genes, which allow for selection of transformed or transfected host cells. Marker genes include biocide resistance, e.g., resistance to antibiotics, heavy metals, etc., complementation in an auxotrophic host to provide prototrophy, and the like. Suitable marker genes for the inventive expression vectors include, for instance, neomycin/G418 resistance genes, hygromycin resistance genes, histidinol resistance genes, tetracycline resistance genes, and ampicillin resistance genes.

[0198] The recombinant expression vector can comprise a native or nonnative promoter operably linked to the nucleotide sequence encoding the polypeptides, proteins, PCSK9 immunogens, conjugates, or functional portions or functional variants thereof, or to the nucleotide sequence which is complementary to or which hybridizes to the nucleotide sequence encoding the inventive polypeptides, proteins, PCSK9 immunogens, conjugates, or functional portions or functional variants thereof. The selection of promoters, e.g., strong, weak, inducible, tissue-specific and developmental-specific, is within the ordinary skill of the artisan. Similarly, the combining of a nucleotide sequence with a promoter is also within the ordinary skill of the artisan. The promoter can be a non-viral promoter or a viral promoter, e.g., a cytomegalovirus (CMV) promoter, an SV40 promoter, an RSV promoter, or a promoter found in the long-terminal repeat of the murine stem cell virus.

[0199] The inventive recombinant expression vectors can be designed for either transient expression, for stable expression, or for both. Also, the recombinant expression vectors can be made for constitutive expression or for inducible expression.

[0200] Further, the recombinant expression vectors can be made to include a suicide gene. As used herein, the term “suicide gene” refers to a gene that causes the cell expressing the suicide gene to die. The suicide gene can be a gene that confers sensitivity to an agent, e.g., a drug, upon the cell in which the gene is expressed, and causes the cell to die when the cell is contacted with or exposed to the agent.

[0201] An aspect of the invention further provides a host cell comprising any of the recombinant expression vectors described herein. As used herein, the term “host cell” refers to any type of cell that can contain the inventive recombinant expression vector. The host cell can be a eukaryotic cell, e.g., plant, animal, fungi, or algae, or can be a prokaryotic cell, e.g., bacteria or protozoa. The host cell can be a cultured cell or a primary cell, i.e., isolated directly from an organism, e.g., a human. The host cell can be an adherent cell or a suspended cell, i.e., a cell that grows in suspension. Suitable host cells are known in the art and include, for instance, DH5α E. coli cells, Chinese hamster ovarian cells, monkey VERO cells, COS cells, HEK293 cells, and the like. For purposes of amplifying or replicating the recombinant expression vector, the host cell may be a prokaryotic cell, e.g., a DH5α cell. For purposes of producing a recombinant polypeptide, protein, PCSK9 immunogens, conjugate, or functional portion or functional variant thereof, the host cell may be a mammalian cell. The host cell may be a human cell. While the host cell can be of any cell type, can originate from any type of tissue, and can be of any developmental stage, the host cell may be a peripheral blood lymphocyte (PBL) or a peripheral blood mononuclear cell (PBMC). The host cell may be a B cell or a T cell.

[0202] Also provided by an aspect of the invention is a population of cells comprising at least one host cell described herein. The population of cells can be a heterogeneous population comprising the host cell comprising any of the recombinant expression vectors described, in addition to at least one other cell, e.g., a host cell (e.g., a T cell), which does not comprise any of the recombinant expression vectors, or a cell other than a T cell, e.g., a B cell, a macrophage, a neutrophil, an erythrocyte, a hepatocyte, an endothelial cell, an epithelial cell, a muscle cell, a brain cell, etc. Alternatively, the population of cells can be a substantially homogeneous population, in which the population comprises mainly host cells (e.g., consisting essentially of) comprising the recombinant expression vector. The population also can be a clonal population of cells, in which all cells of the population are clones of a single host cell comprising a recombinant expression vector, such that all cells of the population comprise the recombinant expression vector. In one aspect of the invention, the population of cells is a clonal population comprising host cells comprising a recombinant expression vector as described herein.

### Immunogenic Carriers

[0203] In some aspects of the vaccine constructs of the present disclosure, an antigenic PCSK9 peptide of the invention is linked to an immunogenic carrier molecule to form immunogens for vaccination protocols, preferably wherein the carrier molecule is not related to the native PCSK9 molecule.

[0204] The term “immunogenic carrier” herein includes those materials which have the property of independently eliciting an immunogenic response in a host animal and which can be covalently coupled to a peptide, polypeptide or protein either directly via formation of peptide or ester bonds between free carboxyl, amino or hydroxyl groups in the peptide, polypeptide or protein and corresponding groups on the immunogenic carrier material, or alternatively by bonding through a conventional bifunctional linking group, or as a fusion protein.

[0205] In specific aspects, the immunogenic carrier may be a virus-like particle (VLP), preferably a recombinant virus-like particle.

[0206] As used herein, the term “virus-like particle” refers to a structure resembling a virus particle but which has been demonstrated to be nonpathogenic. In general, virus-like particles lack at least part of the viral genome. Also, virus-like particles can often be produced in large quantities by heterologous expression and can be easily purified. A virus-like particle in accordance with the invention may contain nucleic acid distinct from their genome. A typical and preferred aspect of a virus-like particle in accordance with the present invention is a viral capsid such as the viral capsid of the corresponding virus, bacteriophage, or RNA-phage.

[0207] In specific aspects, the immunogenic carrier used in combination with an PCSK9 immunogen of the invention is a Qbeta coat protein. Qbeta coat protein was found to self- assemble into capsids when expressed in E. coli (Kozlovska et al., 1993 Gene 137:133-137). The obtained capsids or virus-like particles showed an icosahedral phage-like capsid structure with a diameter of 25 nm and T=3 quasi symmetry. Further, the crystal structure of phage Qss has been solved. The capsid contains 180 copies of the coat protein, which are linked in covalent pentamers and hexamers by disulfide bridges (Golmohammadi et al., 1996 Structure 4: 5435554) leading to a remarkable stability of the capsid of Qbeta coat protein. Qbeta capsid protein also shows unusual resistance to organic solvents and denaturing agents. The high stability of the capsid of Qbeta coat protein is an advantageous feature, in particular, for its use in immunization and vaccination of mammals and humans in accordance of the present invention.

[0208] In some aspects, the immunogenic carrier is selected from keyhole limpet hemocyanin (KLH), tetanus toxoid heavy chain C fragment (rTTHC), H. influenzae protein D (HiD), cross-reactive material from diphtheria toxin (CRM197), and any combination thereof. In such an embodiment, an PCSK9 immunogen of the invention can be conjugated to the immunogenic carrier using a linker, such as is known in the art. Such a conformation is represented diagrammatically in FIG. 10A. Non-limiting examples of embodiments of the present invention incorporating rTTHC are set forth at SEQ ID NO:92 (HIT01 attached to immunogenic carrier rTTHc), SEQ ID NO: 114 (HIT01 fused to TTHC and SPYTAG), SEQ ID NO:116 (HIT01 fused to TTHC and SPYCATCHER), SEQ ID NO: 118 (HIT01 fused to TTHC and SPYCATCHER with five residue linker).

[0209] In some aspects, the immunogenic carrier can be or comprise a nanoparticle, SPYTAG, SPYCATCHER, and the like. Such a conformation is represented diagrammatically in FIG. 10B. “SPYTAG” and “SPYCATCHER” are components of a system for irreversible conjugation of recombinant proteins. The peptide SPYTAG (13 amino acids) spontaneously reacts with the protein SPYCATCHER (12.3 kDa) to form an intermolecular isopeptide bond between the pair. SPYTAG and SPYCATCHER were formed from the splitting and engineering of the CnaB2 domain of the FbaB protein from Streptococcus pyogenes. In such an embodiment, the use of SPYCATCHER/SPYTAG linkers enables multivalent display of the PCSK9 immunogen of the invention on self-assembling nanoparticles. Non-limiting examples of embodiments of the present invention incorporating SPYTAG and SPYCATCHER are set forth at SEQ ID NOs: 114-118 and 123-146. Non-limiting examples of self-assembling nanoparticles that can be employed as conjugates for multivalent display of the PCSK9 immunogen of the invention comprise for example, encapsulin (see, e.g., SEQ ID No: 119 (stabilized encapsulin fused with SPYTAG) and SEQ ID NO:120 (stabilized encapsulin fused with SPYCATCHER)), lumazine synthase (see, e.g., SEQ ID NO: 121 (lumazine synthase, with N71 mutation, fused with SPYTAG)), and ferritin (see, e.g., SEQ ID NO: 122 (ferritin, with N96 mutation, fused with SPYTTAG)), among others known to persons of ordinary skill.

[0210] Additionally, glycans can be used to enhance the solubility of the PCSK9 immunogen of the invention to facilitate multivalent display of the PCSK9 immunogen of the invention on such self-assembling nanoparticles. See, for example, Zhang et al. 2020 Sci Rep. 2020 Oct. 23:10(1): 18149. doi: 10.1038/s41598-020-74949-2.PMID: 33097791, demonstrating that the addition of an N-linked glycan to ferritin increases solubility of this nanoparticle. Thus, for example, the PCSK9 immunogen of the invention can comprise a molecule such as set forth in Sequence Table 11 (SEQ ID Nos: 123-146).

### Linker Constructs of the Invention

[0211] The antigenic PCSK9 peptides of the invention may be coupled to immunogenic carriers via chemical conjugation or by expression of genetically engineered fusion partners. The coupling does not necessarily need to be direct, but can occur through linker sequences (see, e.g., FIG. 10A). More generally, in the case that immunogens either fused, conjugated or otherwise attached to an immunogenic carrier, spacer or linker sequences are typically added at one or both ends of the immunogens. Such linker sequences generally comprise sequences recognized by the proteasome, proteases of the endosomes or other vesicular compartment of the cell.

[0212] In one aspect, the immunogens of the present disclosure are expressed as fusion proteins with the immunogenic carrier. Fusion of the immunogen can be effected by insertion into the immunogenic carrier primary sequence, or by fusion to either the N- or C-terminus of the immunogenic carrier. Hereinafter, when referring to fusion proteins of a peptide to an immunogenic carrier, the fusion to either ends of the subunit sequence or internal insertion of the peptide within the carrier sequence are encompassed. Fusion, as referred to hereinafter, may be effected by insertion of the antigenic peptide into the sequence of the carrier, by substitution of part of the sequence of the carrier with the antigenic peptide, or by a combination of deletion, substitution or insertions.

[0213] When the immunogenic carrier is a VLP, the chimeric immunogen-VLP subunit will be in general capable of self-assembly into a VLP. VLP displaying epitopes fused to their subunits are also herein referred to as chimeric VLPs. For example, EP 0 421 635 B describes the use of chimeric hepadnavirus core antigen particles to present foreign peptide sequences in a virus-like particle.

[0214] Flanking amino acid residues may be added to either end of the sequence of the antigenic peptide to be fused to either end of the sequence of the subunit of a VLP, or for internal insertion of such peptide sequence into the sequence of the subunit of a VLP. Glycine and serine residues are particularly favored amino acids to be used in the flanking sequences added to the peptide to be fused. Glycine residues confer additional flexibility, which may diminish the potentially destabilizing effect of fusing a foreign sequence into the sequence of a VLP subunit.

### Compositions Comprising an PCSK9 Immunogens

[0215] The present disclosure further relates to compositions, particularly immunogenic compositions comprising an antigenic PCSK9 immunogen linked to an immunogenic carrier, and optionally at least one adjuvant. Such immunogenic compositions are useful to prevent, treat or alleviate PCSK9-related disorders.

[0216] In some aspects, an immunogenic composition according to the invention comprises a PCSK9 immunogen, optionally comprising a linker, linked to an immunogenic carrier, selected from Qbeta, DT, PP7, PPV or Norwalk Virus VLP.

[0217] In some aspects, an immunogenic composition according to the invention comprises a PCSK9 immunogen, optionally comprising a linker, linked to an immunogenic carrier, selected from keyhole limpet hemocyanin (KLH), tetanus toxoid heavy chain fragment (rTTHC), H. influenzae protein D (HiD), and cross-reactive material from diphtheria toxin (CRM197).

[0218] In some aspects, a subject immunogenic composition comprises single species of antigenic PCSK9 peptide, e.g., the immunogenic composition comprises a population of antigenic PCSK9 peptides, substantially all of which have the same amino acid sequence. In other aspects, a subject immunogenic composition comprises two or more different antigenic PCSK9 peptides, e.g., the immunogenic composition comprises a population of antigenic PCSK9 peptides, the members of which population can differ in amino acid sequence. A subject immunogenic composition can comprise from two to about 20 different antigenic PCSK9 peptides, e.g., a subject immunogenic composition can comprise 2, 3, 4, 5, 6, 7, 8, 9, 10, 11-15, or 15-20 different antigenic PCSK9 peptides, each having an amino acid sequence that differs from the amino acid sequences of the other antigenic PCSK9 peptides. In some aspects, the PCSK9 immunogen is selected from one of residue regions 153-155, 192-197, 212-217, 220-226, 237-243, 366-372, and 374-381 of PCSK9, as defined by NP_777596.2 (SEQ ID NO:86). The PCSK9 immunogen can comprise one or more of residue regions 153-155, 192-197, 212-217, 220-226, 237-243, 366-372, and 374-381 of PCSK9.

[0219] In some aspects, the PCSK9 immunogen comprises peptides of PCSK9 comprising non-native (engineered) mutations. Non-limiting examples of such motifs include :. KEDGTRFHRsASKCeS (SEQ ID NO: 147), RDAGVAr (SEQ ID NO: 148), and EDIIsASgDCSTCFVS (SEQ ID NO: 149) (Upper case letters denote human PCSK9 residues, lower case letters denote engineered mutations). These three sequence motifs are exemplary only. A review of the sequences in the tables (SEQ ID Nos: 1-146) reveals several instances in which non-native (engineered) mutations are present in the PCSK9 immunogen. The inclusion of such motifs can facilitate removal of 9-mers oligopeptides found in human protein to reduce self-targeting response.

[0220] In other aspects, a subject immunogenic composition comprises a multimerized antigenic PCSK9 polypeptide, as described above. As used herein, the terms “immunogenic composition comprising an antigenic PCSK9 peptide” or “immunogenic composition of the invention” or “subject immunogenic composition” refers to an immunogenic composition comprising either single species (multimerized or not) or multiple species of antigenic PCSK9 peptide(s) coupled or not to an immunogenic carrier. Where two or more peptides are used coupled to a carrier, the peptide may be coupled to the same carrier molecule or individually coupled to carrier molecules and then combined to produce an immunogenic composition.

[0221] Another aspect of the invention relates to methods for producing an immunogen according to the invention, the method comprising coupling an antigenic PCSK9 peptide to an immunogenic carrier. In one aspect, the coupling is chemical.

### Adjuvants

[0222] In some aspects, a subject immunogenic composition comprises at least one adjuvant. Suitable adjuvants include those suitable for use in mammals, preferably in humans. Examples of known suitable adjuvants that can be used in humans include, but are not necessarily limited to, alum, aluminum phosphate, aluminum hydroxide, MF59 (4.3% w/v squalene, 0.5% w/v polysorbate 80 (Tween 80), 0.5% w/v sorbitan trioleate (Span 85)), CpG-containing nucleic acid (where the cytosine is unmethylated), QS21 (saponin adjuvant), MPL (Monophosphoryl Lipid A), 3DMPL (3-O-deacylated MPL), extracts from Aquilla, ISCOMS (see, e.g., Sjolander et al. (1998) J. Leukocyte Biol. 64:713: WO90/03184, WO96/11711, WO 00/48630, WO98/36772, WO00/41720, WO06/134423 and WO07/026,190), LT/CT mutants, poly(D.L-lactide-co-glycolide) (PLG) microparticles, Quil A, TiterMax classic, TiterMax Gold, interleukins, and the like. For veterinary applications including but not limited to animal experimentation, one can use Freund's adjuvant, N-acetyl-muramyl-L-threonyl-D-isoglutamine (thr-MDP), N-acetyl-nor-muramyl-L-alanyl-D-isoglutamine (CGP 11637, referred to as nor-MDP), N-acetylmuramyl-L-alanyl-D-isoglutaminyl-L-alanine-2-(l′-2′-dipalmitoyl-s-n-glycero-3-hydroxy phosphoryloxy)-ethylamine (CGP 19835A, referred to as MTP-PE), and RIBI, which contains three components extracted from bacteria, monophosphoryl lipid A, trehalose dimycolate and cell wall skeleton (MPL+TDM+CWS) in a 2% squalene/Tween 80 emulsion.

[0223] Further exemplary adjuvants to enhance effectiveness of the composition include, but are not limited to: (1) oil-in-water emulsion formulations (with or without other specific immunostimulating agents such as muramyl peptides (see below) or bacterial cell wall components), such as for example (a) MF59™, containing 5% Squalene, 0.5% Tween 80 (polyoxyethylene sorbitan mono-oleate), and 0.5% Span 85 (sorbitan trioleate) (optionally containing muramyl tri-peptide covalently linked to dipalmitoyl phosphatidylethanolamine (MTP-PE)) formulated into submicron particles using a microfluidizer, (b) SAF, containing 10% Squalane, 0.4% Tween 80, 5% pluronic-blocked polymer L121, and thr-MDP either microfluidized into a submicron emulsion or vortexed to generate a larger particle size emulsion, and (c) RIBI™ adjuvant system (RAS), (RIBI IMMUNOCHEM, HAMILTON, Mont.) containing 2% Squalene, 0.2% Tween 80, and one or more bacterial cell wall components such as monophosphory lipid A (MPL), trehalose dimycolate (TDM), and cell wall skeleton (CWS), preferably MPL+CWS (DETOX™): (2) saponin adjuvants, such as QS21, STIMULON™ (Cambridge Bioscience, Worcester, Mass.), ABISCO® (ISCONOVA, Sweden), or ISCOMATRIX® (COMMONWEALTH SERUM LABORATORIES, Australia), may be used or particles generated therefrom such as ISCOMs (immunostimulating complexes), which ISCOMS may be devoid of additional detergent e.g. WO00/07621: (3) Complete Freund's Adjuvant (CFA) and Incomplete Freund's Adjuvant (IFA): (4) cytokines, such as interleukins (e.g. IL-1, IL-2, IL-4, IL-5, IL-6, IL-7, IL-12 (WO99/44636), etc.), interferons (e.g. gamma interferon), macrophage colony stimulating factor (M-CSF), tumor necrosis factor (TNF), etc.: (5) monophosphoryl lipid A (MPL) or 3-O-deacylated MPL (3dMPL) e.g. GB-2220221, EP-A-0689454, optionally in the substantial absence of alum when used with pneumococcal saccharides e.g. WO00/56358: (6) combinations of 3dMPL with, for example, QS21 and/or oil-in-water emulsions e.g. EP-A-0835318, EP-A-0735898, EP-A-0761231: (7) oligonucleotides comprising CpG motifs: International patent applications WO96/02555, WO98/16247, WO98/18810, WO98/40100, WO98/55495, WO98/37919 and WO98/52581] i.e. containing at least one CG dinucleotide, where the cytosine is unmethylated: (8) a polyoxyethylene ether or a polyoxyethylene ester e.g. WO99/52549: (9) a polyoxyethylene sorbitan ester surfactant in combination with an octoxynol (WO01/21207) or a polyoxyethylene alkyl ether or ester surfactant in combination with at least one additional non-ionic surfactant such as an octoxynol (WO01/21152): (10) a saponin and an immunostimulatory oligonucleotide (e.g. a CpG oligonucleotide) (WO00/62800): (11) an immunostimulant and a particle of metal salt e.g. WO00/23105: (12) a saponin and an oil-in-water emulsion e.g. WO99/11241: (13) a saponin (e.g. QS21)+3dMPL+IM2 (optionally+a sterol) e.g. WO98/57659: (14) other substances that act as immunostimulating agents to enhance the efficacy of the composition, such as Muramyl peptides include N-acetyl-muramyl-L-threonyl-D-isoglutamine (thr-MDP), N-25 acetyl-normuramyl-L-alanyl-D-isoglutamine (nor-MDP), N-acetylmuramyl-L-alanyl-D-isoglutarninyl-L-alanine-2-(1′-2′-dipalmitoyl-sn-glycero-3-hydroxy phosphoryloxy)-ethylamine MTP-PE), (15) ligands for toll-like receptors (TLR), natural or synthesized (e.g. as described in Kanzler et al 2007, Nature Medicine 13, p1552-9), including TLR3 ligands such as polyl:C and similar compounds such as HILTONOL and AMPLIGEN. Another suitable adjuvant for use in certain embodiments of the present invention is as described, for example, in U.S. Pat. Nos. 6,676,958 and 7,879,333 and sold under the tradename ADJUPLEX.

[0224] In a particular aspect, the adjuvant is an immunostimulatory oligonucleotide and more preferably a CpG oligonucleotide. A CpG oligonucleotide as used herein refers to an immunostimulatory CpG oligodeoxynucleotide (CpG ODN), and accordingly these terms are used interchangeably unless otherwise indicated. Immunostimulatory CpG oligodeoxynucleotides contain one or more immunostimulatory CpG motifs that are unmethylated cytosine-guanine dinucleotides, optionally within certain preferred base contexts. The methylation status of the CpG immunostimulatory motif generally refers to the cytosine residue in the dinucleotide. An immunostimulatory oligonucleotide containing at least one unmethylated CpG dinucleotide is an oligonucleotide which contains a 5′ unmethylated cytosine linked by a phosphate bond to a 3′ guanine, and which activates the immune system through binding to Toll-like receptor 9 (TLR-9). In another aspect the immunostimulatory oligonucleotide may contain one or more methylated CpG dinucleotides, which will activate the immune system through TLR9 but not as strongly as if the CpG motif(s) was/were unmethylated. CpG immunostimulatory oligonucleotides may comprise one or more palindromes that in turn may encompass the CpG dinucleotide. CpG oligonucleotides have been described in a number of issued patents, published patent applications, and other publications, including U.S. Pat. Nos. 6,194,388; 6,207,646; 6,214,806; 6,218,371; 6,239,116; and 6,339,068.

### Pharmaceutical Compositions of the Invention

[0225] The invention also provides pharmaceutical compositions comprising an antigenic PCSK9 peptide of the invention or an immunogenic composition thereof, in a formulation in association with one or more pharmaceutically acceptable excipient(s) and optionally combined with one or more adjuvants, as described above. The term ‘excipient’ is used herein to describe any ingredient other than the active ingredient, i.e. the antigenic PCSK9 peptide of the invention eventually coupled to an immunogenic carrier and optionally combined with one or more adjuvants. The choice of excipient(s) will to a large extent depend on factors such as the particular mode of administration, the effect of the excipient on solubility and stability, and the nature of the dosage form. As used herein, “pharmaceutically acceptable excipient” includes any and all solvents, dispersion media, coatings, antibacterial and antifungal agents, isotonic and absorption delaying agents, and the like that are physiologically compatible. Some examples of pharmaceutically acceptable excipients are water, saline, phosphate buffered saline, dextrose, glycerol, ethanol and the like, as well as combinations thereof. In many cases, it will be preferable to include isotonic agents, for example, sugars, polyalcohols such as mannitol, sorbitol, or sodium chloride in the composition. Additional examples of pharmaceutically acceptable substances are wetting agents or minor amounts of auxiliary substances such as wetting or emulsifying agents, preservatives or buffers, which enhance the shelf life or effectiveness of the active ingredient.

[0226] Pharmaceutical compositions of the present invention and methods for their preparation will be readily apparent to those skilled in the art. Such compositions and methods for their preparation may be found, for example, in Remington: The Science and Practice of Pharmacy, 23rd Edition (Academic Press 2020). Pharmaceutical compositions are preferably manufactured under GMP conditions.

[0227] A pharmaceutical composition of the invention may be prepared, packaged, or sold in bulk, as a single unit dose, or as a plurality of single unit doses. As used herein, a “unit dose” is a discrete amount of the pharmaceutical composition comprising a predetermined amount of the active ingredient. The amount of the active ingredient is generally equal to the dosage of the active ingredient which would be administered to a subject or a convenient fraction of such a dosage such as, for example, one-half or one-third of such a dosage.

[0228] Any method for administering peptides, or proteins accepted in the art may suitably be employed for the peptides or proteins of the invention.

[0229] The pharmaceutical compositions of the invention are typically suitable for parenteral administration. As used herein, “parenteral administration” of a pharmaceutical composition includes any route of administration characterized by physical breaching of a tissue of a subject and administration of the pharmaceutical composition through the breach in the tissue, thus generally resulting in the direct administration into the blood stream, into muscle, or into an internal organ. Parenteral administration thus includes, but is not limited to, administration of a pharmaceutical composition by injection of the composition, by application of the composition through a surgical incision, by application of the composition through a tissue-penetrating non-surgical wound, and the like. In particular, parenteral administration is contemplated to include, but is not limited to, subcutaneous, intraperitoneal, intramuscular, intrasternal, intravenous, intraarterial, intrathecal, intraventricular, intraurethral, intracranial, intrasynovial injection or infusions: and kidney dialytic infusion techniques. Preferred aspects include the intravenous, subcutaneous, intradermal and intramuscular routes, even more preferred aspects are the intramuscular or the subcutaneous routes.

[0230] Formulations of a pharmaceutical composition suitable for parenteral administration typically generally comprise the active ingredient combined with a pharmaceutically acceptable carrier, such as sterile water or sterile isotonic saline. Such formulations may be prepared, packaged, or sold in a form suitable for bolus administration or for continuous administration. Injectable formulations may be prepared, packaged, or sold in unit dosage form, such as in ampoules or in multi-dose containers containing a preservative. Formulations for parenteral administration include, but are not limited to, suspensions, solutions, emulsions in oily or aqueous vehicles, pastes, and the like. Such formulations may further comprise one or more additional ingredients including, but not limited to, suspending, stabilizing, or dispersing agents. In one aspect of a formulation for parenteral administration, the active ingredient is provided in dry (i.e. powder or granular) form for reconstitution with a suitable vehicle (e.g. sterile pyrogen-free water) prior to parenteral administration of the reconstituted composition. Parenteral formulations also include aqueous solutions which may contain excipients such as salts, carbohydrates and buffering agents (preferably to a pH of from 3 to 9), but, for some applications, they may be more suitably formulated as a sterile non-aqueous solution or as a dried form to be used in conjunction with a suitable vehicle such as sterile, pyrogen-free water. Exemplary parenteral administration forms include solutions or suspensions in sterile aqueous solutions, for example, aqueous propylene glycol or dextrose solutions. Such dosage forms can be suitably buffered, if desired. Other parentally-administrable formulations which are useful include those which comprise the active ingredient in microcrystalline form, microparticles, or in a liposomal preparation. Formulations for parenteral administration may be formulated to be immediate and/or modified release. Modified release formulations include delayed-, sustained-, pulsed-, controlled-, targeted and programmed release.

[0231] For example, in one aspect, sterile injectable solutions can be prepared by incorporating the anti-PCSK9 peptide, preferably coupled to an immunogenic carrier, optionally in combination with one or more adjuvants, in the required amount in an appropriate solvent with one or a combination of ingredients enumerated above, as required, followed by filtered sterilization. Generally, dispersions are prepared by incorporating the active compound into a sterile vehicle that contains a basic dispersion medium and the required other ingredients from those enumerated above. In the case of sterile powders for the preparation of sterile injectable solutions, the preferred methods of preparation are vacuum drying and freeze-drying that yields a powder of the active ingredient plus any additional desired ingredient from a previously sterile-filtered solution thereof. The proper fluidity of a solution can be maintained, for example, by the use of a coating such as lecithin, by the maintenance of the required particle size in the case of dispersion and by the use of surfactants. Prolonged absorption of injectable compositions can be brought about by including in the composition an agent that delays absorption, for example, monostearate salts and gelatin.

[0232] An exemplary, non-limiting pharmaceutical composition of the invention is a formulation as a sterile aqueous solution having a pH that ranges from about 5.0 to about 6.5 and comprising from about 0.1 mg/mL to about 20 mg/mL of a peptide of the invention, from about 1 millimolar to about 100 millimolar of histidine buffer, from about 0.01 mg/mL to about 10 mg/mL of polysorbate 80, from about 100 millimolar to about 400 millimolar of trehalose, and from about 0.01 millimolar to about 1.0 millimolar of disodium EDTA dihydrate.

[0233] The PCSK9 immunogens of the invention can also be administered intranasally or by inhalation, typically in the form of a dry powder (either alone, as a mixture, or as a mixed component particle, for example, mixed with a suitable pharmaceutically acceptable excipient) from a dry powder inhaler, as an aerosol spray from a pressurized container, pump, spray, atomizer (preferably an atomizer using electrohydrodynamics to produce a fine mist), or nebulizer, with or without the use of a suitable propellant, or as nasal drops.

[0234] The pressurized container, pump, spray, atomizer, or nebulizer generally contains a solution or suspension of an immunogen of the invention comprising, for example, a suitable agent for dispersing, solubilizing, or extending release of the active, a propellant(s) as solvent.

[0235] Prior to use in a dry powder or suspension formulation, the drug product is generally micronized to a size suitable for delivery by inhalation (typically less than 5 microns). This may be achieved by any appropriate comminuting method, such as spiral jet milling, fluid bed jet milling, supercritical fluid processing to form nanoparticles, high pressure homogenization, or spray drying.

[0236] Capsules, blisters and cartridges for use in an inhaler or insufflator may be formulated to contain a powder mix of the compound of the invention, a suitable powder base and a performance modifier.

[0237] A suitable solution formulation for use in an atomizer using electrohydrodynamics to produce a fine mist may contain a suitable dose of the antigenic PCSK9 peptide of the invention per actuation and the actuation volume may vary from 1 μL to 100 μL.

[0238] Suitable flavors, such as menthol and levomenthol, or sweeteners, such as saccharin or saccharin sodium, may be added to those formulations of the invention intended for inhaled/intranasal administration.

[0239] Formulations for inhaled/intranasal administration may be formulated to be immediate and/or modified release. Modified release formulations include delayed-, sustained-, pulsed-, controlled-, targeted and programmed release.

[0240] In the case of dry powder inhalers and aerosols, the dosage unit is determined by means of a valve which delivers a metered amount. Units in accordance with the invention are typically arranged to administer a metered dose or “puff” of an immunogen of the invention. The overall daily dose will typically be administered in a single dose or, more usually, as divided doses throughout the day.

[0241] A pharmaceutical composition comprising an PCSK9 immunogen may also be formulated for an oral route administration. Oral administration may involve swallowing, so that the compound enters the gastrointestinal tract, and/or buccal, lingual, or sublingual administration by which the compound enters the blood stream directly from the mouth.

[0242] Formulations suitable for oral administration include solid, semi-solid and liquid systems such as tablets: soft or hard capsules containing multi- or nano-particulates, liquids, or powders: lozenges (including liquid-filled): chews: gels: fast dispersing dosage forms: films: ovules: sprays: and buccal/mucoadhesive patches.

[0243] Liquid formulations include suspensions, solutions, syrups and elixirs. Such formulations may be employed as fillers in soft or hard capsules (made, for example, from gelatin or hydroxy propylmethylcellulose) and typically comprise a carrier, for example, water, ethanol, polyethylene glycol, propylene glycol, methylcellulose, or a suitable oil, and one or more emulsifying agents and/or suspending agents. Liquid formulations may also be prepared by the reconstitution of a solid, for example, from a sachet.

[0244] The compositions of the invention can be used to treat, alleviate or prevent PCSK9-mediated disorders or symptoms in a subject at risk or suffering from such disorder or symptom by stimulating an immune response in the subject by immunotherapy. Immunotherapy can comprise an initial immunization followed by additional, e.g. one, two, three, or more boosters.

[0245] An “immunologically effective amount” of an antigenic PCSK9 peptide of the invention, or composition thereof, is an amount that is delivered to a mammalian subject, either in a single dose or as part of a series, which is effective for inducing an immune response against PCSK9 in the subject. This amount varies depending upon the health and physical condition of the individual to be treated, the taxonomic group of individual to be treated, the capacity of the individual's immune system to synthesize antibodies, the formulation of the vaccine, and other relevant factors.

[0246] A “pharmaceutically effective dose” or “therapeutically effective dose” is that dose required to treat or prevent, or alleviate one or more PCSK9-related disorder or symptom in a subject. The pharmaceutically effective dose depends on inter alia the specific compound to administer, the severity of the symptoms, the susceptibility of the subject to side effects, the type of disease, the composition used, the route of administration, the type of mammal being treated, the physical characteristics of the specific mammal under consideration such as health and physical condition, concurrent medication, the capacity of the individual's immune system to synthesize antibodies, the degree of protection desired, and other factors that those skilled in the medical arts will recognize. For prophylaxis purposes, the amount of peptide in each dose is selected as an amount which induces an immunoprotective response without significant adverse side effects in typical vaccines. Following an initial vaccination, subjects may receive one or several booster immunizations adequately spaced.

[0247] It is understood that the specific dose level for any particular patient depends upon a variety of factors including the activity of the specific compound employed, the age, body weight, general health, sex, diet, time of administration, route of administration, and rate of excretion, drug combination and the severity of the particular disease undergoing therapy.

[0248] For example, PCSK9 immunogens or pharmaceutical composition of the invention can be administered to a subject at a dose of about 0.1 μg to about 5 mg, e.g., from about 0.1 μg to about 5 μg, from about 5 μg to about 10 μg, from about 10 μg to about 25 μg, from about 25 μg to about 50 μg, from about 50 μg to about 100 μg, from about 100 μg to about 500 μg, from about 500 μg to about 1 mg, from about 1 mg to about 2 mg, with optional boosters given at, for example, 1 week, 2 weeks, 3 weeks, 4 weeks, two months, three months, 6 months and/or a year later.

[0249] In some aspects, a single dose of an antigenic PCSK9 peptide or pharmaceutical composition according to the invention is administered. In other aspects, multiple doses of an antigenic PCSK9 peptide or pharmaceutical composition according to the invention are administered. The frequency of administration can vary depending on any of a variety of factors, e.g., severity of the symptoms, degree of immunoprotection desired, whether the composition is used for prophylactic or curative purposes, etc. For example, in some aspects, an PCSK9 immunogen or pharmaceutical composition according to the invention is administered once per month, twice per month, three times per month, every other week, once per week, twice per week, three times per week, four times per week, five times per week, six times per week, every other day, daily, twice a day, or three times a day. When the composition of the invention is used for prophylaxis purposes, they will be generally administered for both priming and boosting doses. It is expected that the boosting doses will be adequately spaced, or preferably given yearly or at such times where the levels of circulating antibody fall below a desired level. Boosting doses may consist of the PCSK9 immmunogen in the absence of the original immunogenic carrier molecule. Such booster constructs may comprise an alternative immunogenic carrier or may be in the absence of any carrier. Such booster compositions may be formulated either with or without adjuvant.

[0250] The duration of administration of an antigenic PCSK9 peptide according to the invention, e.g., the period of time over which an antigenic PCSK9 peptide is administered, can vary, depending on any of a variety of factors, e.g., patient response, etc. For example, an antigenic PCSK9 peptide can be administered over a period of time ranging from about one day to about one week, from about two weeks to about four weeks, from about one month to about two months, from about two months to about four months, from about four months to about six months, from about six months to about eight months, from about eight months to about 1 year, from about 1 year to about 2 years, or from about 2 years to about 4 years, or more.

[0251] A variety of treatment methods are also contemplated by the present disclosure, which methods comprise administering an antigenic PCSK9 peptide according to the invention. Subject treatment methods include methods of inducing an immune response in an individual to self-PCSK9, and methods of preventing, alleviating or treating a PCSK9-related disorder or symptom in an individual.

[0252] In one aspect, the present invention provides a method for treating, preventing or alleviating a PCSK9-related disorder or symptom in a subject, comprising administering a therapeutically effective amount of an antigenic PCSK9 peptide of the invention, or immunogenic or pharmaceutical composition thereof, to the subject.

[0253] In another aspect, the present invention provides a method for inducing an immune response against self-PCSK9 in a subject, comprising administering a therapeutically or immunogenically effective amount of an antigenic PCSK9 peptide of the invention, or immunogenic or pharmaceutical composition thereof, to the subject.

[0254] A PCSK9 related disease or a PCSK9 mediated disease is, for example, a disease where the inhibition of PCSK9 activity or the inhibition of the interaction of PCSK9 with the LDL receptor could be beneficial.

[0255] “Treat”, “treating” and “treatment” refer to a method of alleviating or abrogating a biological disorder and/or at least one of its attendant symptoms. As used herein, to “alleviate” a disease, disorder or condition means reducing the severity and/or occurrence frequency of the symptoms of the disease, disorder, or condition. Further, references herein to “treatment” include references to curative and palliative treatment. The subject is preferably human, and may be either male or female, of any age.

[0256] Other aspects of the invention relate to an antigenic PCSK9 peptide according to the invention or of an immunogenic composition or a pharmaceutical composition thereof, for use as a medicament, preferably in treatment, alleviation or prophylaxis of PCSK9-related disorders.

[0257] In yet another aspect, the present invention provides the use of an antigenic PCSK9 peptide of the invention or of an immunogenic composition or a pharmaceutical composition thereof, in the manufacture of a medicament, preferably for treating a PCSK9- related disorder.

[0258] In particular, the invention relates to an antigenic PCSK9 peptide of the invention, or an immunogenic or pharmaceutical composition thereof, for use as a medicament preferably in treatment, alleviation or prophylaxis of diseases associated with an elevated level of cholesterol.

[0259] In yet another aspect, the present invention provides the use of an antigenic PCSK9 peptide of the invention or of an immunogenic composition or a pharmaceutical composition thereof, in the manufacture of a medicament, preferably for lowering the LDL-cholesterol level in blood in a subject in need thereof.

[0260] In some aspects of the uses or methods of the invention, the PCSK9-related disorder is selected from the group consisting of elevated cholesterol, a condition associated with elevated LDL-cholesterol, e.g., a lipid disorder (e.g., hyperlipidemia, type I, type II, type III, type IV, or type V hyperlipidemia, secondary hypertriglyceridemia, hypercholesterolemia, familial hypercholesterolemia, xanthomatosis, lecithin:cholesterol acetyltransferase deficiency), arteriosclerotic conditions (e.g., atherosclerosis), coronary artery disease, and cardiovascular disease.

[0261] In yet another aspect, the present invention provides the use of an antigenic PCSK9 peptide of the invention or of an immunogenic composition or a pharmaceutical composition thereof, in the manufacture of a medicament for treating or alleviating diseases where an up-regulation of the LDL receptor or an inhibition of the interaction between PCSK9 and the LDL receptor is beneficial.

[0262] In yet another aspect, the present invention provides the use of an antigenic PCSK9 peptide of the invention or of an immunogenic composition or a pharmaceutical composition thereof, in the manufacture of a medicament for the treatment of Alzheimer's disease.

[0263] In other aspects of the uses or methods of the invention, the subject is a mammal, preferably a human subject.

[0264] In still other aspects of the uses or methods of the invention, the subject suffers from the PSCK9-related disorder. Alternatively, the subject is at risk of suffering from the PCSK9-related disorder, e.g., due to the presence of one or more risk factors (e.g., hypertension, cigarette smoking, diabetes, obesity, or hyperhomocysteinemia).

[0265] The PCSK9 immunogen of the invention or an immunogenic composition or a pharmaceutical composition thereof are useful for subjects who are intolerant to therapy with another cholesterol-reducing agent, or for whom therapy with another cholesterol-reducing agent has produced inadequate results (e.g., subjects who experience insufficient LDL-c reduction on statin therapy). The PCSK9 immunogen of the invention described herein can be administered to a subject with elevated LDL-cholesterol.

[0266] Preferably a subject with elevated cholesterol is a human subject with total plasma cholesterol levels of 200 mg/dl or greater. Preferably a subject with elevated cholesterol is a human subject with LDL-cholesterol levels of 160 mg/dl or greater.

[0267] Total plasma cholesterol levels and LDL-cholesterol levels are measured using standard methods on blood samples obtained after an appropriate fast. Protocols to measure total plasma cholesterol levels and LDL-cholesterol levels are well-known to persons skilled in the art.

[0268] In one aspect the PCSK9 immunogen or an immunogenic composition or a pharmaceutical composition thereof is administered together with another agent, the two can be administered sequentially in either order or simultaneously. In some aspects, an PCSK9 immunogen or an immunogenic composition or a pharmaceutical composition thereof is administered to a subject who is also receiving therapy with a second agent (e.g., a second cholesterol-reducing agent). Cholesterol reducing agents include statins, bile acid sequestrants, niacin, fibric acid derivatives, and long chain alpha, omego-dicarboxylic acids. Statins inhibit cholesterol synthesis by blocking HMGCoA, a key enzyme in cholesterol biosynthesis. Examples of statins are lovastatin, pravastatin, atorvastatin, cerivastatin, fluvastatin, and simvastatin. In some aspects, combination therapy with an PCSK9 immunogen or an immunogenic composition or a pharmaceutical composition thereof and a statin produces synergistic results (e.g., synergistic reductions in cholesterol). In some subjects, this can allow reduction in statin dosage to achieve the desired cholesterol levels.

[0269] Another aspect of the invention relates to the use of a vaccine construct of the invention in the manufacture of a medicament for the treatment of a PCSK9-related disorder or condition, as described above.

[0270] Another aspect of the invention relates to the use of an immunogenic composition of the invention in the preparation of a medicament for the treatment of a PCSK9-related disorder or condition, as described above.

[0271] Another aspect of the invention relates to a vaccine construct of the invention for use in the treatment of a PCSK9-related disorder or condition, as described above. In these aspects, the vaccine construct may be designed to be administered as a pharmaceutical composition including at least one excipient, as described above.

[0272] Other specific aspects include methods of treating a PCSK9-related disorder or condition, as described above, in an individual comprising administering an effective amount of a vaccine construct of the invention to an individual in need thereof.

[0273] Each publication or patent document cited in this disclosure is incorporated herein by reference in its entirety.

[0274] The invention now being generally described will be more readily understood by reference to the following examples, which are included merely for the purposes of illustration of certain aspects of the aspects of the present invention. The examples are not intended to limit the invention, as one of skill in the art would recognize from the above teachings and the following examples that other techniques and methods can satisfy the claims and can be employed without departing from the scope of the claimed invention.

### EXAMPLES

### Example 1: Design of PCSk9 Mimic Immunogens. (FIGS. 1A-1D)

[0275] To identify the epitope residues for antibodies targeting human PCSK9, buried surface area was calculated between human PCSK9 and LDL-R, and between human PCSK9 and antibodies 1D05, mAb1, J16, or Fab33 using NACCESS. Human PCSK9 residues that contact multiple antibodies/LDL-R, such as the following, were grafted on various scaffold proteins:
[0276] 153-155
[0277] 192-197
[0278] 212-217
[0279] 220-226
[0280] 237-243
[0281] 366-372
[0282] 374-381

[0283] To identify the scaffold to graft the Human PCSK9 residues, non-human PCSK9 deposited at the NCBI (ncbi.nlm.nih.gov) was identified and the DALI webserver (ekhidna2.biocenter.helsinki.fi/dali/) was used to identify structural homologs to Human PCSK9. Once the Human PCSK9 epitope residues were grafted on to the scaffold sequence based on sequence alignment, 9-mers identical to human protein 9-mers were identified, by comparing all 9-mer of the epitope-scaffold to all 9-mers of all human (Build 37, hg19 (February 2009) from the International Human Genome Consortium). For 9-mers identical to human 9-mers, mutations were made to remove this identity and choice of mutations were based on minimizing the impact of the mutation to antibody binding or stability of the protein.

### Example 2: Antigenic Screening to Identify PCSk9 Mimic Immunogens With Desired Antigenic Profile

[0284] Logarithmic growth cell preparation: HEK 293T cells (Invitrogen, CA) were thawed and incubated with Growth Medium (DMEM with 10% Fetal Bovine Serum and 1% streptomycin-penicillin) at 37° C., 5% CO₂. The cells are cultured under logarithmic growth conditions, and passed by dislodging the cells by gently tapping the side of the flask until the cells reached logarithmic growth status.

[0285] Seeding: 24 hours prior to DNA-transient transfection, 100 μl of logarithmic growth cells were seeded in each well of a 96-well microplate at a density of 2.5×10⁵ cells/ml (prepared with 0.05% Trypsin-EDTA separation), spun down at 200×g for 6 min, and resuspended in optimized expression medium (REALFECT-Medium, ABI SCIENTIFIC, VA), and incubated at 37° C., 5% CO₂ for 24 hours (cell confluence: ˜80%). Prior to transfection, 40 μl of spent medium in each well was removed without replacement.

[0286] Transfection: DNA-TRUEFECT-MAX complexes were prepared by mixing 0.25 μg DNA in 10 μl of Opti-MEM (Invitrogen) with 0.75 μl of TRUEFECT-MAX (UNITED BIOSYSTEMS, Bethesda, MD) in 10 μl of Opti-MEM, and incubating for 15 min prior to transfection. 20 μl of the complex was added into each well and gently mixed manually (or agitated at 40 rpm on a shaker), and then the 96-well plate was incubated at 37° C., 5% CO₂. During incubation, the plate was gently mixed hourly a couple of times.

[0287] Feeding: 6 hours to 20 hours post-transfection, 30 μl of enriched feed medium (CELL GROWTH ENHANCER FOR ADHERENT CELLS, ABI SCIENTIFIC, VA) was added to each well. (Option: during incubation, gently mixing the incubated 96-well plate daily.)

[0288] Antigenic assay: After incubation for four days post-transfection, the antigenic analysis of PCKS9 immunogens was characterized by 96-well-formatted ELISA. Briefly, 30 μl per well of the expressed immunogen supernatant mixed with 70 μl per well of PBS was incubated in a Nickel coated 96-well plate (Thermo Scientific, IL) for two hours at room temperature (RT). After washing. 100 μl per well of 10 μg/ml primary antibody in 50% CELBOOSTER CELL GROWTH ENHANCER MEDIUM and PBS with 0.02% tween 20 was incubated for 1 hour at RT. After washing, 100 μl per well of Horseradish peroxidase (HRP)-conjugated goat anti-human IgG antibody (JACKSON IMMUNORESEARCH LABORATORIES INC., PA), diluted at 1:10,000 in CELBOOSTER CELL GROWTH ENHANCER MEDIUM with 0.02% tween 20, was incubated for 30 min at RT. After washing, the reaction signal was developed using 100 μl of BioFX-TMB (SURMODICS, MN) at RT for 10 min, and then stopped with 100 μl of 0.5 N H₂SO₄. The readout was measured at a wavelength of 450 nm, and OD₄₅₀ values were normalized and analyzed. All samples were performed in duplicate.

[0289] For the antigenic analysis of PCSK9 variants, following primary antibodies that inhibit PCKS9 function were assessed: AMG145, J16, Fab33, Alirocumab, 1D05, mAb1, and antibodies for negative control: Mota, VRC01, and antibody used to quantitate the expression levels of immunogens: anti-Strep mAb.

[0290] HIT01—The leading candidate, HIT01 (SEQ ID NO: 1), also termed “PCSK9 HIT01”, was based on grafting of human PCSK9 epitope residues on to iridescent shark PCSK9, with 9-mers identical to human 9-mers removed.

### Example 3: Protein Production and Purification (FIG. 2A)

[0291] The DNA constructs for protein expression were synthesized and subcloned in pVRC8400 expression vector. For protein expression, 3 ml of TURBO293 transfection reagent (SPEED BIOSYSTEMS) were mixed with 50 ml OPTI-MEM medium (LIFE TECHNOLOGY) and incubated at room temperature for 5 min. 1 mg plasmid DNA was mixed with 50 ml of OPTI-MEM medium in a separate tube, and the mixture were added to the TURBO293 OPTI-MEM MIXTURE. The transfection mixture was incubated for 15 min at room temperature then added to 800 ml of EXPI293 cells (LIFE TECHNOLOGY) at 2.5 million cells/ml. The transfected cells were incubated overnight in a shaker incubator at 9% CO₂, 37° C., and 120 rpm. On the second day, about 100 ml of EXPI293 expression medium was added. On day 5 post transfection, supernatants were harvested and filtered. Proteins were purified from the supernatant using Ni-NTA and strep chromatography, consecutively, followed by size exclusion column on SUPERDEX 200 INCREASE 10/300 GL in PBS. FIG. 2A illustrates the size-exclusion chromatography (SEC) profile of PCSK9-mimic HIT01.

### Example 4: Antigenicity Analysis (FIGS. 2B-2C)

[0292] A fortéBio Octet HTX instrument was used to measure antibody recognition of hPCSK9. Specific binding responses were obtained using Ni-NTA sensor tips and sera dilutions in the range of 1:200 in PBS supplemented with 1% BSA. Assays were performed at 30° C. in tilted black 384-well plates (GEIGER BIO-ONE) with agitation set to 1,000 rpm in PBS supplemented with 1% BSA and a well volume of 55 μl. All experiments were performed in duplicate.

[0293] hPCSK9 probes (20 μg/ml) were immobilized for 300 s on Ni-NTA biosensor tips. The association after 300 s was recorded. For antibody blocking assay, sensor tips were loaded with 20 μg/ml blocking antibody for 300 s. Data analysis was performed using Octet data analysis program. Data are reflected in FIG. 2B.

[0294] In a separate experiment, for AMG145 and J16, FIG. 2C illustrates the apparent KD of HIT01 binding as determined by using Octet, solid lines are observed response curves and dotted lines are fitting curves. The results indicate the designed PCSK9 mimic immunogen HIT01 contains epitopes that are recognized by a panel of monoclonal antibodies, which have been shown to reduce cholesterol when passively infused, such as mAb1 and AMG145: Schiele F. et al, JMB 2013 (pubmed.ncbi.nlm.nih.gov/24252255/), Alirocumab: Gusarova V. et al, Clin Lipidol. 2012 (tandfonline.com/doi/pdf/10.2217/clp. 12.70), J16: Liang H, et al, Journal of Pharmacology and Experimental Therapeutics, 2012 (jpet.aspetjournals.org/content/340/2/228), Fab 33: Zhang Y. et al, Nature Structural & Molecular Bio. (nature.com/articles/nsmb.3453?proof=t), and 1D05: Ni Y.G. et al, J Lipid Res. 2011 (pubmed.ncbi.nlm.nih.gov/20959675/).

### Example 5: Mouse Immunization Study (FIGS. 3A and 3B)

[0295] Groups of 10 Balb/cJ mice were immunized 2 times in two-week intervals. For each immunization, 10 μg human wt PCSK9, HIT01, or PBS formulated with 100 μg of Aluminum hydroxide gel in the final volume of 100 μL were injected intramuscularly to the caudle thigh of the two hind legs.

[0296] Serum samples were taken six weeks after the last immunization. The results (FIG. 3B) reveal that the PCSK9-mimic HIT01 significantly reduced LDL-C, HDL-C, and cholesterol compared to the PBS group.

### Example 6: Sera Binding Analysis (FIGS. 3C and 3D)

[0297] A fortéBio Octet HTX instrument was used to measure sera recognition of PCSK9. Specific binding responses were obtained using Ni-NTA sensor tips and antibody dilutions in PBS OCTET KINETICS BUFFER (FORTÉBIO). Assays were performed at 30° C. in tilted black 384-well plates (GEIGER BIO-ONE) with agitation set to 1,000 rpm in OCTET KINETICS BUFFER and a well volume of 55 μl. PCSK9 probes (20 μg/ml) were immobilized for 300 s on Ni-NTA biosensor tips and equilibrated for 60 s prior to measuring serum samples from immunized animals at 200 fold dilution. Data analysis was performed using OCTET and GRAPHPAD PRISM 6 software.

[0298] FIG. 3C illustrates the sera antibody Octet binding response of hPCSK9, hPCSK9 HIT01, and a PBS control against hPCSK9 and mPCSK9, with and without competition by antibody AMG145. FIG. 3D illustrates the correlation of sera response targeting AMG145 epitope, as defined by mPCSK9 Octoberet binding minus mPCSK9 Octoberet binding when competed by antibody AMG145 for cholesterol (left) and LDL-C (right). The results demonstrated LDL-R competitive antibodies are elicited in HIT01-immunized animals.

### Example 7: Inhibition of LDL-R/hPCSK9 Interaction by Immunized Sera. (Prophetic)

[0299] 50 microgram/ml of hPCSK9 protein (HIS tagged) were loaded onto OCTET Ni-NTA sensors. The hPCSK9-loaded sensors were then dipped into 100-300× dilution of serum collected from immunized animals. These sensors were then dipped into baseline buffer and 2000 nM of LDL-R (with human Fc tag) respectively. The response levels of both serum antibody and LDL-R were analyzed by using OCTET DATA analysis program. LDL-R competition activity was calculated as the percentage ration of LDL-R response compared to serum antibody response.

### Example 8: Quantification of Amount of PCSK9 in Sera. (Prophetic)

[0300] PCSK9 in vitro SIMPLESTEP ELISAR (Enzyme-Linked Immunosorbent Assay) kit is used for the quantitative measurement of mouse PCSK9 in serum. Briefly, the SIMPLESTEP ELISAR employs an affinity tag labeled capture antibody and a reporter conjugated detector antibody which immunocaptures the sample analyte in solution. This entire complex (capture antibody/analyte/detector antibody) is in turn immobilized via immunoaffinity of an anti-tag antibody coating the well. To perform the assay, samples or standards are added to the wells, followed by the antibody mix. After incubation, the wells are washed to remove unbound material. TMB Development Solution is added and during incubation is catalyzed by HRP, generating blue coloration. This reaction is then stopped by addition of Stop Solution completing any color change from blue to yellow. Signal is generated proportionally to the amount of bound analyte and the intensity is measured at 450 nm. Optionally, instead of the endpoint reading, development of TMB can be recorded kinetically at 600 nm.

### Example 9: Proteolytic Digestion of PSCK9-Mimicking Immunogen “PCSK9 HIT01” (FIGS. 4 and 5)

[0301] PCSK9) and PCSK9 HIT01 samples were tested for proteolytic cleavage as indicated in FIG. 4 either as fresh samples or incubated at 4° C. Thereafter, the protein samples were run on gel and stained. The results. as depicted in FIG. 4. revealed that. whereas the PCSK9 shows two major bands at (a) between 49 kDa and 62 kDa and (b) at approximately 17 kDa. the PCSK9 HIT01 samples resulted in five discrete proteolytic bands. representing five distinct products of proteolytic cleavage. Based on a sequence analysis (see. e.g., SEQ ID Nos: 2-4). it was predicted that proteolytic cleavage of the PCSK9 HIT01 protein would occur at the site “FAQSIP” within the sequence. resulting in two products of MW 12994.86 and 59284.28, respectively:

DYSEDKEVKAPQLDHPDPGTERVAELLRCTKSVWRIPEQYLVVLREGTRDSHVQRT VSTLRAQAARRGHAIHIMHTYSGVFHGFLIKMSSEVLPMALKLPHVAYIEEDSSIFAQ (SEQ ID NO:152), having MW 12994.83 and
SIPWNLqRIIQTKHETGKYTPPNDGAQVTVFLLDTSVQTDHREIEGKVMVTDFNSMPK EDGTRFHRsASKCeSHGTHIAGVLSGRDAGVArGVSVNTVRVLNCQGRGTVSGALAG LEYIRASLQAQPVSPVIILLPFVGGFSRTLNTACREMVHSGAVLIAAAGNYQDDACM YSPASEPEVITVGASNAADRPLSSGTTGTNLGRCVDVFAPGEDIIsASgDCSTCFVSMS GTSQsAAHaAGIAAVLLNAYPSASPAEVLQLLRYHAVQRVINPDSLPPEHYLTTPDMV AALPTSAATGEKLLCRSVWSKRSGVGSFDTAVARCRHGEEMFSCSSYSPNGVHAGE RIEIRDGQKVCEAHHGIGGQGVYAvARCCTGSRVKCHASASLHVGIDAECPSQEFQL TGCSSHYIRSQDVAQPSWPLHSNRKACPAGEGGTSHAFCCHAPNLECHLIEHHQSEF TKQVEVSCEDSWTLTGCNAVSHGSVTHAAYTRGNTCVIQMFGGDKGAAAIAICCRY RPLDQQSNNNHEQNTgglevlfqgpghhhhhhsawshpqfek (SEQ ID NO: 153), having MW 59284.28. Accordingly, the observation that the proteolysis of the pro-protein of PCSK9 HIT01 resulted in five identifiable products revealed that it was not cleaved as expected. resulting from multiple off-target cleavages in the PCSK9 HIT01 immunogen.

[0302] The bands were separated on SDS-PAGE gel and then were cut out for N-terminal protein sequencing analysis. The sequences of the constituents of the bands determined to be as follows:

Band I, with tags MW 59284.28, = band 2 + 5:
(SEQ ID NO: 154)
SIPWNLqRIIQTKHETGKYTPPNDGAQVTVFLLDTSVQTDHREIEGKVMVTDFNSMPK
EDGTRFHRsASKCeSHGTHIAGVLSGRDAGVArGVSVNTVRVLNCQGRGTVSGALAG
LEYIRASLQAQPVSPVIILLPFVGGFSRTLNTACREMVHSGAVLIAAAGNYQDDACM
YSPASEPEVITVGASNAADRPLSSGTTGTNLGRCVDVFAPGEDIIsASgDCSTCFVSMS
GTSQsAAHaAGIAAVLLNAYPSASPAEVLQLLRYHAVQRVINPDSLPPEHYLTTPDMV
AALPTSAATGEKLLCRSVWSKRSGVGSFDTAVARCRHGEEMFSCSSYSPNGVHAGE
RIEIRDGQKVCEAHHGIGGQGVYAvARCCTGSRVKCHASASLHVGIDAECPSQEFQL
TGCSSHYIRSQDVAQPSWPLHSNRKACPAGEGGTSHAFCCHAPNLECHLIEHHQSEF
TKQVEVSCEDSWTLTGCNAVSHGSVTHAAYTRGNTCVIQMFGGDKGAAAIAICCRY
RPLDQQSNNNHEQNTgglevlfqgpghhhhhhsawshpqfek,
Band 2, most possibly is the C-term portion of Band I, 51689.76:
(SEQ ID NO: 155)
sASKCeSHGTHIAGVLSGRDAGVArGVSVNTVRVLNCQGRGTVSGALAGLEYIRASL
QAQPVSPVIILLPFVGGFSRTLNTACREMVHSGAVLIAAAGNYQDDACMYSPASEPE
VITVGASNAADRPLSSGTTGTNLGRCVDVFAPGEDIIsASgDCSTCFVSMSGTSQsAAH
aAGIAAVLLNAYPSASPAEVLQLLRYHAVQRVINPDSLPPEHYLTTPDMVAALPTSAA
TGEKLLCRSVWSKRSGVGSFDTAVARCRHGEEMFSCSSYSPNGVHAGERIEIRDGQK
VCEAHHGIGGQGVYAvARCCTGSRVKCHASASLHVGIDAECPSQEFQLTGCSSHYIR
SQDVAQPSWPLHSNRKACPAGEGGTSHAFCCHAPNLECHLIEHHQSEFTKQVEVSCE
DSWTLTGCNAVSHGSVTHAAYTRGNTCVIQMFGGDKGAAAIAICCRYRPLDQQSNN
NHEQNTgglevlfqgpghhhhhhsawshpqfek,
Band 3, MW: 12994.83:
(SEQ ID NO: 156)
DYSEDKEVKAPQLDHPDPGTERVAELLRCTKSVWRIPEQYLVVLREGTRDSHVQRT
VSTLRAQAARRGHAIHIMHTYSGVFHGFLIKMSSEVLPMALKLPHVAYIEEDSSIFAQ,
Band 4, cleavage product of band 3, cleaved after a Lys:
(SEQ ID NO: 157)
EVKAPQLDHPDPGTERVAELLRCTKSVWRIPEQYLVVLREGTRDSHVQRTVSTLRAQ
AARRGHAIHIMHTYSGVFHGFLIKMSSEVLPMALKLPHVAYIEEDSSIFAQ,
and
Band 5, (N-term portion of Band I, cleavage product of band 1..., 7612.54):
(SEQ ID NO: 158)
SIPWNLqRIIQTKHETGKYTPPNDGAQVTVFLLDTSVQTDHREIEGKVMVTDFNSMPk
EDGTRFHR.

[0303] Accordingly, reviewing the sequences of band 1 (beginning with SIP) and band 4 (ending with FAQ) indicates that, despite the observation of non-specific proteolytic digestion, the proprotein did exhibit appropriate processing at the FAQ/SIP location. Lysine (K21) was identified as a potential cleavage site, as was R218. Accordingly, two variants were designed to assess whether the observed non-specific proteolytic cleavage could be mitigated: these are identified as HIT01-K21Q-R218Q (SEQ ID NO: 13) and HIT01-K21Q- R218E (SEQ ID NO:14).

### Example 10—Stability and Binding Affinity of HIT01-K21Q-R218E (FIGS. 6A Through 6D)

[0304] The stability of HIT01-K21Q-R218E (SEQ ID NO:14) was assessed (see FIGS. 6A through 6D). FIG. 6A is SDS-PAGE data obtained at different protein storage buffer condition. The results indicate the upper band shift between reducing and non-reducing condition is consistent at various buffers. FIG. 6B is the profile of HIT01-K21Q-R218E analyzed on a size exclusion chromatography column. FIG. 6C illustrates the size distribution of HIT01-K21Q-R218E protein analyzed on a dynamic light scattering instrument. FIG. 6D is DSD_PAGE data for fresh HIT01-K21Q-R218E and at one-week intervals for four successive weeks. The results show that the HIT01-K21Q-R218E protein is stable for several weeks, although some progressive degradation is observed over the four-week period.

[0305] The binding affinity of HIT01-K21Q-R218E was assessed in comparison to unmodified PCSK9 HIT01. Briefly, antibodies (AMG145, Alirocumab, J16, Fab33, and 1D05) were separately loaded at 50 μg/ml on AHC sensors, and then dipped into PCSK9 HIT01, HIT-01 combo3 (representing a combination of mutations to reduce the amount of 8-mer and 7-mer human sequences in PCKS9), and HIT01-K21Q-R218E at 500 nm and 2× serial dilutions. The binding affinity was then calculated using the Octet Data Analysis program. The results are presented in the following table (“HIT01” refers to “PCSK9 HIT01”):

Binding Affinity KD (nM)

| Antibody IgG | HIT01 | HIT01-Combo3 | HIT01-K21Q-R218E |
|---|---|---|---|
| AMG145 | <0.001 | 0.005 | <0.001 |
| Alirocumab | 97.3 | 112.2 | 58.0 |
| J16 | 0.2 | 1.2 | 0.4 |
| Fab33 | 9.4 | 20.7 | 15.3 |
| 1D05 | 0.2 | 1.2 | 0.5 |

[0306] These results show that HIT01-K21Q-R218E retains the antigenicity similarly to its parent protein HIT01. The K21Q and R218E mutations have no significant impact on immunogenicity of HIT01 as an immunogen.

### Example 11—Mouse Immunization Study With HIT01-K21Q-R218E (FIGS. 7A Through 7C)

[0307] A mouse immunization study was conducted to assess the effect of HIT01-K21Q-R218E in comparison to wilt type human PCSK99, wild type mouse PCSK9, as well as a PBS control. The protocol is outlined in FIG. 7A and was similar to the immunization study discussed above in Example 5.

[0308] One result of the study is depicted in FIG. 7B. Terminal bleed sera from the mice in the study (Group 3 from FIG. 7A) was diluted 200-fold in 1% BSA PBS. 50 μg/ml of the indicated immunogen was immobilized on a Ni-NTA sensor. For antibody blocking, 50 μg/ml was loaded onto the immunogen-loaded sensor. The results indicated that the best recognition of this sera is to HIT01-K21Q-R281E (first column on left). With some reactivity to human PCKS9 (hPCSK9 shown in the 2nd column from the left). The other columns show different reactivity of this sera to the different immunogens.

[0309] Another result of the study is depicted in FIG. 7C, which depicts the LDL-C level in the mice treated with HIT01-K21Q-R218E, wild type human PCSK9, wild type mouse PCSK9, as well as a PBS control. The analysis was conducted in accordance with a two-tailed Mann-Whitney test. The results in FIG. 7C show that HIT01QE can reduce LDL-C slightly more than human PCSK9 (first column), and substantially better than mouse PCSK9 (second column) or PBS (fourth column). However, the range of LDL-C was too variable and there was no statistical difference between these groups.

### Example 12—NHP Analysis of HIT01-K21Q-R218E (FIGS. 8A Through 8M)

[0310] This Example presents the results of a nonhuman primate (NHP) study concerning the immunization and antibody responses of HIT01-K21Q-R218E. The study protocol is schematically summarized in FIG. 8A. Briefly, one group of seven Cynomolgus monkeys was employed. The immunization scheme involved injecting 100 μg HIT01-K21Q-R218E into each animal with a carbomer-based adjuvant, ADJUPLEX at weeks 0, 4, 12, and 20. Serum was obtained from each animal at two-week intervals over 30 weeks.

[0311] Data from the study concerning the longitudinal serum antibody levels for each of the animals in the study are plotted in FIG. 8B, and a comparison between the anti-HIT01 or PCSK9 IgG response is depicted in FIG. 8C.

[0312] To assess efficacy, the LDL, cholesterol, and HDL levels from serum collected from each animal in the study were assessed for 30 weeks prior to and 30 weeks post injection. The data are presented in FIGS. 8D, 8E, and 8F.

[0313] Pooled data for LDL, HDL, and cholesterol serum levels measured for animals in the NHP study at pre-bleed t0 vs week 2 following the third immunization are presented in FIG. 8G. Similar data comparing pre-bleed t0 vs week 2 following the fourth immunization are presented in FIG. 8H. Similar data comparing pre-bleed t0 vs week 13 following the third immunization are presented in FIG. 8I. Similar data comparing pre-bleed t0 vs week 2 following the final immunization are presented in FIG. 8J. Similar data comparing the average levels pre-bleed vs week 2 following the fourth immunization are presented in FIG. 8K. Similar data comparing the LDL, HDL, and cholesterol serum levels measured at the third immunization vs week 2 following the third immunization are presented in FIG. 8L. Similar data comparing the LDL, HDL, and cholesterol serum levels measured at the fourth immunization vs week 2 following the fourth immunization are presented in FIG. 8M. The statistical analysis for these FIGS. 8G through 8M) was performed by a two-tailed Mann-Whitney U-Test with no continuity correction.

[0314] The results of this NHP study indicate that HIT01-K21Q-R218E immunization lowered LDL levels without disruption HDL levels. Significant differences were observed between (a) pre-bleed t0 vs week 2 post 3rd immunization for LDL, but not for HDL and Cholesterol (b) pre-bleed t0 vs week 2 post 4th immunization for LDL and Cholesterol, but not for HDL and (c) pre-bleed t0 vs all weeks post 3rd immunization for LDL, but not for HDL and Cholesterol. Differences which border on significant were observed between (a) week 0 vs week 2 post 4th immunization for LDL and Cholesterol, but not for HDL and (b) the average of all pre-bleed weeks vs week 2 post 4th immunization for LDL, but not HDL and cholesterol. No significant difference was observed between (a) the 3rd Immunization vs week 2 after for LDL, HDL, or Cholesterol or (b) the 4th Immunization vs week 2 after for LDL, HDL, or Cholesterol.

[0315] Thus, these results indicate that the impact of immunization in NHP with HIT01-K21Q-R218E is relatively short term in terms of reduced cholesterol, observed at 2 weeks after immunization but appearing to decline at 4 weeks. Moreover, individual differences between the separate animals in the study are noted, and these may complicate interpretation of the LDL changes.

### Example 13—Competition Assay Using AMG145 (FIG. 9)

[0316] this Example presents the results of a study assessing the target specificity of HIT01-K21Q-R218E and wild type PCSK9.

[0317] Using sera from the NHP study (Example 11) through week 34 post injection, a competition assay was performed using antibody AMG145, which targets the LDL-R binding site. Immunogen-specific antibody response was assessed by immobilizing 50 μg/ml wt PCSK9 or HIT01-K21Q-R218E onto Ni-NTA sensors. The association with the indicated serum samples at 200-fold dilution was recorded and plotted out as depicted in FIG. 9. Similarly, for antibody blocking assays, wt PCSK9 or HIT01-K21Q-R218E loaded Ni-NTA sensors were loaded additionally with 50 μg/ml blocking antibody AMG145 for 300 s and assayed using serum samples from immunized animals. The results, plotted past 500 s, are depicted in FIG. 9. The data from this assay are presented in FIG. 9.

[0318] The results reveal a lower response when the serum is assayed using HIT01-K21Q-R218E blocked with AMG145 than when assayed using HIT01-K21Q-R218E alone. This result supports a conclusion that HIT01-K21Q-R218E elicits antibody responses targeting the LDL binding site. A comparison using wt PCSK9 alone or in conjunction with AMG145 blocking also was conducted. A reduction also is observed with AMG145 blocking in comparison to PCSK9 probe alone. The overall reduction is around 50% when the probes were block with AMG145, a LDL-R blocking antibody.

### Example 14—HIT01-Combo3 (FIGS. 12A Through 12C)

[0319] To evaluate HIT01 variants with no 8-mer identical to human proteins, such molecules were expressed in EXPI293 cell culture. One such protein is HIT01-Combo3 (SEQ ID NO:85).

[0320] After protein purification, the proteins were analyzed on SDS-PAGE gel (FIG. 12A). HIT01-Combo3 shows protein bands without degradation when compared to HIT01 on the right-hand side. Within this Figure, HIT01_HRV-3C-v4 (SEQ ID NO:5) represents the addition of HRV-3C to remove the C-terminal domain: HIT01-K21Q-R218E (SEQ ID NO:14) reflects mutations to reduce self-cleavage: HIT01-TT1273-1284 (SEQ ID NO:12) reflects the addition of T-cell help from tetanus toxoid at the C-terminal, and HIT01-Combo3 (SEQ ID NO:85, FIG. 12B) reflects mutations to remove 8-mers identical to the human sequence. FIG. 12B presents a sequence alignment comparing HIT01-Combo3 with HIT01, with an indication of normal processing and unintended cleavage of HIT01.

[0321] HIT01-Combo3 then was evaluated for its size exclusion chromatography profile and antibody binding kinetics (FIG. 12B). 50 μg/ml of antibodies were loaded on AHC sensors. The samples were the respective HIT01 variant 500 nm and 2× series dilutions. The SEC profile at the upper right corner of FIG. 12C reveals a homogenous protein preparation. HIT01-Combo3 binds to 5 our 6 PCSK9 monoclonal antibodies at the similar level to its parent HIT01 molecule (the binding curves at the bottom part of FIG. 12C).

[0322] These results demonstrated the engineering of a well-behaved HIT01 variant with no 8-mer identical to human proteins.

### Example 15—Glycocylation (FIGS. 13A Through 13Q)

[0323] This Example reports the engineering of PCDK9 mimics (HIT01 variants) on nanoparticles for improved antigenicity and stability.

[0324] FIG. 13A graphically illustrates glycan designs to enhance HIT01-K21Q-R218E nanoparticle solubility. A series of variants with mutations adding N-linked glycosylation sites to HIT01-K21Q-R218E molecules was designed and fabricated. SpyTag (SpyT) or Spy Catcher (SpyC) sequences also were added to the variants for conjugation with Spy Tag or Spy Cather self-assembling nanoparticles. The constructs are listed in Table 11 (SEQ ID Nos: 123-146).

[0325] These constructs were tested for their expression. One particular design, HIT01-K21Q-R218E 9glycans-SpyT (SEQ ID NO:146), behaved well in protein expression and nanoparticle conjugation. FIG. 13B presents the results of SDS-PAGE gel analysis for purified HIT01-K21Q-R218E 9glycans-SpyT protein. The gel image on right hand side of the slide indicated a clear protein band shift up when compared to its parent construct HIT01-K21Q-R218E on the left-hand side. This is interpreted to represent glycan addition to the protein.

[0326] Another component of the nanoparticle conjugation system is encapsulin- Spy Cather nanoparticle. HIT01-K21Q-R218E 9glycans-SpyT was expressed and purified separately (the encapsulin-Spy Catcher nanoparticle was published in PCT Application No.: PCT/US2019/052419). To make nanoparticle conjugate, HIT01-K21Q-R218E 9glycans-SpyT and encapsulin-Spy Cather were mixed together with 1:1 molar ratio and incubated overnight at 4° C. Assembled HIT01-K21Q-R218E 9glycans-encapsulin nanoparticles were separated from un-conjugated encapsulin-Spy Catcher and HIT01-K21Q-R218E 9glycans-SpyT by loading the mixture to SEC column. As shown in FIG. 13C, the peak at 9 ml elution volume is the conjugated product.

[0327] The formation of HIT01-K21Q-R218E 9glycans-encapsulin nanoparticles was further verified using negative stain electron microcopy. The image in FIG. 13D shows clearly the encapsulin core nanoparticle and the PCSK9 protein on the surface of nanoparticle core. Taken together, these results demonstrated the successful addition of glycan on HIT01-K21Q-R218E molecules. Moreover, HIT01-K21Q-R218E nanoparticle immunogens were successfully produced by using HIT01-K21Q-R218E glycan variants and Spy Tag nanoparticle system.

[0328] As shown in FIGS. 13E through 13N, HIT01-K21Q-R218E 9glycans-encapsulin nanoparticles immunogen was evaluated for its antibody binding activity. For the experiments, 10 μg/ml of antibodies were loaded on the AHC sensors. The samples consisted of the indicated HIT01 variant 500 nm and 2× series dilutions. For 4 out of 5 antibodies tested, HIT01-K21Q-R218E 9glycans-encapsulin bind tightly to the four antibodies without off-rate. These results demonstrated HIT01-K21Q-R218E 9glycans-encapsulin has higher affinity to a panel of monoclonal antibodies that block LDL-R receptor binding to PCSK9. This suggests the nanoparticle immunogen could elicit better antibody responses in animals than monomeric form of HIT01-K21Q-R218E molecule.

[0329] Animal studies in BALB/cJ mice also were performed using the HIT01-K21Q-R218E 9glycans-encapsulin nanoparticles immunogen. The immunization scheme is depicted in FIG. 13O and was similar to the immunization schemes discussed above in Examples 5 and 11. 10 μg/per mouse were injected intramuscularly with Alum, week 0, boosted at 2, with the readout at week 4.

[0330] One result of the study is depicted in FIG. 13P. The assay was conducted similarly as described in connection with FIG. 7B in Example 11. Briefly, terminal bleed sera from the mice in the study was diluted 200-fold in 1% BSA PBS. 50 μg/ml of the indicated immunogen was immobilized on a Ni-NTA sensor. For antibody blocking, 50 μg/ml was loaded onto the immunogen-loaded sensor. The results indicated that the best recognition of this sera was to HIT01-K21Q-R281E (first column on left). The reactivity of the HIT01-K21Q-R218E 9glycans-encapsulin nanoparticles and HIT01-K21Q-R218E 9glycans-encapsulin Spy Catcher immunogens, however, is shown to be higher than the PBS control and the mouse PCSK9 immunogen.

[0331] Another result of the study is depicted in FIG. 13Q, which depicts the LDL-C level in the mice treated with HIT01-K21Q-R218E 9glycans-encapsulin nanoparticles and HIT01-K21Q-R218E 9glycans-encapsulin Spy Tag immunogens, wild type human PCSK9, wild type mouse PCSK9, HIT01-K21Q-R218E, prebled group 21-27, as well as a PBS control. The analysis was conducted in accordance with a two-tailed Mann-Whitney test. The results in FIG. 13Q show that both HIT01-K21Q-R218E 9glycans-encapsulin nanoparticles and HIT01-K21Q-R218E 9glycans-encapsulin Spy Tag immunogens can reduce LDL-C slightly more than human PCSK9 (first column), and substantially better than mouse PCSK9 (second column) or PBS (fourth column) or the prebled group (seventh column) and were on par with HIT01-K21Q-R218E. Statistical significance relative to PBS is as shown in the figure.

### TABLES OF SEQUENCES

[0332] The following tables (Tables 1 through 11) present certain sequences of proteins/polypeptides referred to in this specification. With respect to the indicated sequences, certain of them contain C-terminal “tag” sequences, which are optional. In particular, for sequences containing a C-terminal sequence of “gglvpr/gshhhhhhsawshpqfek” (SEQ ID NO:159), which represents a thrombin cleavage site plus HIS tag and strep tag useful for purification, the protein/polypetide with the associated name can vary from the recited sequence by (a) lacking the entirety of SEQ ID NO: 159 or (b) lacking the portion of SEQ ID NO: 159 following the “/” character. Furthermore, for sequences containing a C-terminal sequence of “gglevlfqg/pghhhhhhsawshpqfek” (SEQ ID NO:160), which represents an HRVC3 cleavage site plus HIS tag and strep tag useful for purification, the protein/polypetide with the associated name can vary from the recited sequence by (a) lacking the entirety of SEQ ID NO: 160 or (b) lacking the portion of SEQ ID NO:160 following the “/” character. Furthermore, for sequences containing a C-terminal sequence of “ggggsggggsmknldcwvdneedidvilkkstilnldinndiisdisgfnssvitypdaqlvpgingkaihlvnnessevivhka mdieyndmfnnftvsfwlrvpkvsashleqygtneysiissmkkhslsigsgwsvslkgnnliwtlkdsagevrqitfrdlpdkf nay lankwwfititndrlssanlyingvlmgsaeitglgairednnitlkldrennnnqyvsidkfrifckalnpkeieklytsylsitfl rdfwgnplry dteyylipvassskdvqlknitdymyltnapsytngklniyyrrlynglkfiikrytpnneidsfvksgdfiklyvsy nnnehivgypkdgnafnnldrilrvgynapgiplykkmeavklrdlktysvqlklyddknaslglvgthngqigndpnrdilias nwyfnhlkdkilgcdwyfvptdegwtndGGGLVPQQSGAHIVMVDAYKPTKgsghhhhhhsawshpqfe k” (SEQ ID NO: 161), which represents rTTHC in lower case, then linker plus Spy Tag in upper case, followed by C-terminal purification tags, the protein/polypetide with the associated name can vary from the recited sequence by lacking the entirety of SEQ ID NO:161. Furthermore, for sequences containing a C-terminal sequence of “ggglvpqqsgAHIVMVDAYKPTKgsghhhhhhsawshpqfek” (SEQ ID NO: 162), which represents a thrombin cleavage site in lower case, then Spy Tag in upper case, then and purification tags in lower case, the protein/polypetide with the associated name can vary from the recited sequence by lacking the entirety of SEQ ID NO: 162.

Lengthy table referenced here
US20240299510A1-20240912-T00001
Please refer to the end of the specification for access instructions.

Lengthy table referenced here
US20240299510A1-20240912-T00002
Please refer to the end of the specification for access instructions.

Lengthy table referenced here
US20240299510A1-20240912-T00003
Please refer to the end of the specification for access instructions.

Lengthy table referenced here
US20240299510A1-20240912-T00004
Please refer to the end of the specification for access instructions.

Lengthy table referenced here
US20240299510A1-20240912-T00005
Please refer to the end of the specification for access instructions.

Lengthy table referenced here
US20240299510A1-20240912-T00006
Please refer to the end of the specification for access instructions.

Lengthy table referenced here
US20240299510A1-20240912-T00007
Please refer to the end of the specification for access instructions.

Lengthy table referenced here
US20240299510A1-20240912-T00008
Please refer to the end of the specification for access instructions.

Lengthy table referenced here
US20240299510A1-20240912-T00009
Please refer to the end of the specification for access instructions.

Lengthy table referenced here
US20240299510A1-20240912-T00010
Please refer to the end of the specification for access instructions.

Lengthy table referenced here
US20240299510A1-20240912-T00011
Please refer to the end of the specification for access instructions.

[0333] All references, including publications, patent applications, and patents, cited herein are hereby incorporated by reference to the same extent as if each reference were individually and specifically indicated to be incorporated by reference and were set forth in its entirety herein.

[0334] The use of the terms “a” and “an” and “the” and similar referents in the context of describing the invention (especially in the context of the following claims) are to be construed to cover both the singular and the plural, unless otherwise indicated herein or clearly contradicted by context. The terms “comprising,” “having,” “including,” and “containing” are to be construed as open-ended terms (i.e., meaning “including, but not limited to,”) unless otherwise noted. Recitation of ranges of values herein are merely intended to serve as a shorthand method of referring individually to each separate value falling within the range, unless otherwise indicated herein, and each separate value is incorporated into the specification as if it were individually recited herein. All methods described herein can be performed in any suitable order unless otherwise indicated herein or otherwise clearly contradicted by context. The use of any and all examples, or exemplary language (e.g., “such as”) provided herein, is intended merely to better illuminate the invention and does not pose a limitation on the scope of the invention unless otherwise claimed. No language in the specification should be construed as indicating any non-claimed element as essential to the practice of the invention.

[0335] Preferred aspects of this invention are described herein, including the best mode known to the inventors for carrying out the invention. Variations of those preferred aspects may become apparent to those of ordinary skill in the art upon reading the foregoing description. The inventors expect skilled artisans to employ such variations as appropriate, and the inventors intend for the invention to be practiced otherwise than as specifically described herein. Accordingly, this invention includes all modifications and equivalents of the subject matter recited in the claims appended hereto as permitted by applicable law. Moreover, any combination of the above-described elements in all possible variations thereof is encompassed by the invention unless otherwise indicated herein or otherwise clearly contradicted by context.

LENGTHY TABLES
The patent application contains a lengthy table section. A copy of the table is available in electronic form from the USPTO web site (https://seqdata.uspto.gov/?pageRequest=docDetail&DocID=US20240299510A1). An electronic copy of the table will also be available from the USPTO upon request and payment of the fee set forth in 37 CFR 1.19(b)(3).

The application's sequence listing, which the Patent Office published only in electronic form, follows.

SEQUENCE LISTING (164 sequences)

SEQ ID NO: 1 - protein, 659 aa, Artificial Sequence
  synthetic
MHLVLVLCLAALAACDYSEDKEVKAPQLDHPDPGTERVAELLRCTKSVWRIPEQYLVVLREGTRDSHVQRTVSTLRAQAARRGHAIHIMHTYSGVFHGFLIKMSSEVLPMALKLPHVAYIEEDSSIFAQSIPWNLQRIIQTKHETGKYTPPNDGAQVTVFLLDTSVQTDHREIEGKVMVTDFNSMPKEDGTRFHRSASKCESHGTHIAGVLSGRDAGVARGVSVNTVRVLNCQGRGTVSGALAGLEYIRASLQAQPVSPVIILLPFVGGFSRTLNTACREMVHSGAVLIAAAGNYQDDACMYSPASEPEVITVGASNAADRPLSSGTTGTNLGRCVDVFAPGEDIISASGDCSTCFVSMSGTSQSAAHAAGIAAVLLNAYPSASPAEVLQLLRYHAVQRVINPDSLPPEHYLTTPDMVAALPTSAATGEKLLCRSVWSKRSGVGSFDTAVARCRHGEEMFSCSSYSPNGVHAGERIEIRDGQKVCEAHHGIGGQGVYAVARCCTGSRVKCHASASLHVGIDAECPSQEFQLTGCSSHYIRSQDVAQPSWPLHSNRKACPAGEGGTSHAFCCHAPNLECHLIEHHQSEFTKQVEVSCEDSWTLTGCNAVSHGSVTHAAYTRGNTCVIQMFGGDKGAAAIAICCRYRPLDQQSNNNHEQNT

SEQ ID NO: 2 - protein, 691 aa, Artificial Sequence
  synthetic
MHLVLVLCLAALAACDYSEDKEVKAPQLDHPDPGTERVAELLRCTKSVWRIPEQYLVVLREGTRDSHVQRTVSTLRAQAARRGHAIHIMHTYSGVFHGFLIKMSSEVLPMALKLPHVAYIEEDSSIFAQSIPWNLQRIIQTKHETGKYTPPNDGAQVTVFLLDTSVQTDHREIEGKVMVTDFNSMPKEDGTRFHRSASKCESHGTHIAGVLSGRDAGVARGVSVNTVRVLNCQGRGTVSGALAGLEYIRASLQAQPVSPVIILLPFVGGFSRTLNTACREMVHSGAVLIAAAGNYQDDACMYSPASEPEVITVGASNAADRPLSSGTTGTNLGRCVDVFAPGEDIISASGDCSTCFVSMSGTSQSAAHAAGIAAVLLNAYPSASPAEVLQLLRYHAVQRVINPDSLPPEHYLTTPDMVAALPTSALEVLFQGPATGEKLLCRSVWSKRSGVGSFDTAVARCRHGEEMFSCSSYSPNGVHAGERIEIRDGQKVCEAHHGIGGQGVYAVARCCTGSRVKCHASASLHVGIDAECPSQEFQLTGCSSHYIRSQDVAQPSWPLHSNRKACPAGEGGTSHAFCCHAPNLECHLIEHHQSEFTKQVEVSCEDSWTLTGCNAVSHGSVTHAAYTRGNTCVIQMFGGDKGAAAIAICCRYRPLDQQSNNNHEQNTGGLVPRGSHHHHHHSAWSHPQFEK

SEQ ID NO: 3 - protein, 691 aa, Artificial Sequence
  synthetic
MHLVLVLCLAALAACDYSEDKEVKAPQLDHPDPGTERVAELLRCTKSVWRIPEQYLVVLREGTRDSHVQRTVSTLRAQAARRGHAIHIMHTYSGVFHGFLIKMSSEVLPMALKLPHVAYIEEDSSIFAQSIPWNLQRIIQTKHETGKYTPPNDGAQVTVFLLDTSVQTDHREIEGKVMVTDFNSMPKEDGTRFHRSASKCESHGTHIAGVLSGRDAGVARGVSVNTVRVLNCQGRGTVSGALAGLEYIRASLQAQPVSPVIILLPFVGGFSRTLNTACREMVHSGAVLIAAAGNYQDDACMYSPASEPEVITVGASNAADRPLSSGTTGTNLGRCVDVFAPGEDIISASGDCSTCFVSMSGTSQSAAHAAGIAAVLLNAYPSASPAEVLQLLRYHAVQRVINPDSLPPEHYLTTPDMVAALPTSAALEVLFQGPTGEKLLCRSVWSKRSGVGSFDTAVARCRHGEEMFSCSSYSPNGVHAGERIEIRDGQKVCEAHHGIGGQGVYAVARCCTGSRVKCHASASLHVGIDAECPSQEFQLTGCSSHYIRSQDVAQPSWPLHSNRKACPAGEGGTSHAFCCHAPNLECHLIEHHQSEFTKQVEVSCEDSWTLTGCNAVSHGSVTHAAYTRGNTCVIQMFGGDKGAAAIAICCRYRPLDQQSNNNHEQNTGGLVPRGSHHHHHHSAWSHPQFEK

SEQ ID NO: 4 - protein, 691 aa, Artificial Sequence
  synthetic
MHLVLVLCLAALAACDYSEDKEVKAPQLDHPDPGTERVAELLRCTKSVWRIPEQYLVVLREGTRDSHVQRTVSTLRAQAARRGHAIHIMHTYSGVFHGFLIKMSSEVLPMALKLPHVAYIEEDSSIFAQSIPWNLQRIIQTKHETGKYTPPNDGAQVTVFLLDTSVQTDHREIEGKVMVTDFNSMPKEDGTRFHRSASKCESHGTHIAGVLSGRDAGVARGVSVNTVRVLNCQGRGTVSGALAGLEYIRASLQAQPVSPVIILLPFVGGFSRTLNTACREMVHSGAVLIAAAGNYQDDACMYSPASEPEVITVGASNAADRPLSSGTTGTNLGRCVDVFAPGEDIISASGDCSTCFVSMSGTSQSAAHAAGIAAVLLNAYPSASPAEVLQLLRYHAVQRVINPDSLPPEHYLTTPDMVAALPTSAATLEVLFQGPGEKLLCRSVWSKRSGVGSFDTAVARCRHGEEMFSCSSYSPNGVHAGERIEIRDGQKVCEAHHGIGGQGVYAVARCCTGSRVKCHASASLHVGIDAECPSQEFQLTGCSSHYIRSQDVAQPSWPLHSNRKACPAGEGGTSHAFCCHAPNLECHLIEHHQSEFTKQVEVSCEDSWTLTGCNAVSHGSVTHAAYTRGNTCVIQMFGGDKGAAAIAICCRYRPLDQQSNNNHEQNTGGLVPRGSHHHHHHSAWSHPQFEK

SEQ ID NO: 5 - protein, 691 aa, Artificial Sequence
  synthetic
MHLVLVLCLAALAACDYSEDKEVKAPQLDHPDPGTERVAELLRCTKSVWRIPEQYLVVLREGTRDSHVQRTVSTLRAQAARRGHAIHIMHTYSGVFHGFLIKMSSEVLPMALKLPHVAYIEEDSSIFAQSIPWNLQRIIQTKHETGKYTPPNDGAQVTVFLLDTSVQTDHREIEGKVMVTDFNSMPKEDGTRFHRSASKCESHGTHIAGVLSGRDAGVARGVSVNTVRVLNCQGRGTVSGALAGLEYIRASLQAQPVSPVIILLPFVGGFSRTLNTACREMVHSGAVLIAAAGNYQDDACMYSPASEPEVITVGASNAADRPLSSGTTGTNLGRCVDVFAPGEDIISASGDCSTCFVSMSGTSQSAAHAAGIAAVLLNAYPSASPAEVLQLLRYHAVQRVINPDSLPPEHYLTTPDMVAALPTSAATGLEVLFQGPEKLLCRSVWSKRSGVGSFDTAVARCRHGEEMFSCSSYSPNGVHAGERIEIRDGQKVCEAHHGIGGQGVYAVARCCTGSRVKCHASASLHVGIDAECPSQEFQLTGCSSHYIRSQDVAQPSWPLHSNRKACPAGEGGTSHAFCCHAPNLECHLIEHHQSEFTKQVEVSCEDSWTLTGCNAVSHGSVTHAAYTRGNTCVIQMFGGDKGAAAIAICCRYRPLDQQSNNNHEQNTGGLVPRGSHHHHHHSAWSHPQFEK

SEQ ID NO: 6 - protein, 697 aa, Artificial Sequence
  synthetic
MHLVLVLCLAALAACDYSEDKEVKAPQLDHPDPGTERVAELLRCTKSVWRIPEQYLVVLREGTRDSHVQRTVSTLRAQAARRGHAIHIMHTYSGVFHGFLIKMSSEVLPMALKLPHVAYIEEDSSIFAQSIPWNLQRIIQTKHETGKYTPPNDGAQVTVFLLDTSVQTDHREIEGKVMVTDFNSMPKEDGTRFHRSASKCESHGTHIAGVLSGRDAGVARGVSVNTVRVLNCQGRGTVSGALAGLEYIRASLQAQPVSPVIILLPFVGGFSRTLNTACREMVHSGAVLIAAAGNYQDDACMYSPASEPEVITVGASNAADRPLSSGTTGTNLGRCVDVFAPGEDIISASGDCSTCFVSMSGTSQSAAHAAGIAAVLLNAYPSASPAEVLQLLRYHAVQRVINPDSLPPEHYLTTPDMVAALPTSAGSGLEVLFQGPGSGATGEKLLCRSVWSKRSGVGSFDTAVARCRHGEEMFSCSSYSPNGVHAGERIEIRDGQKVCEAHHGIGGQGVYAVARCCTGSRVKCHASASLHVGIDAECPSQEFQLTGCSSHYIRSQDVAQPSWPLHSNRKACPAGEGGTSHAFCCHAPNLECHLIEHHQSEFTKQVEVSCEDSWTLTGCNAVSHGSVTHAAYTRGNTCVIQMFGGDKGAAAIAICCRYRPLDQQSNNNHEQNTGGLVPRGSHHHHHHSAWSHPQFEK

SEQ ID NO: 7 - protein, 697 aa, Artificial Sequence
  synthetic
MHLVLVLCLAALAACDYSEDKEVKAPQLDHPDPGTERVAELLRCTKSVWRIPEQYLVVLREGTRDSHVQRTVSTLRAQAARRGHAIHIMHTYSGVFHGFLIKMSSEVLPMALKLPHVAYIEEDSSIFAQSIPWNLQRIIQTKHETGKYTPPNDGAQVTVFLLDTSVQTDHREIEGKVMVTDFNSMPKEDGTRFHRSASKCESHGTHIAGVLSGRDAGVARGVSVNTVRVLNCQGRGTVSGALAGLEYIRASLQAQPVSPVIILLPFVGGFSRTLNTACREMVHSGAVLIAAAGNYQDDACMYSPASEPEVITVGASNAADRPLSSGTTGTNLGRCVDVFAPGEDIISASGDCSTCFVSMSGTSQSAAHAAGIAAVLLNAYPSASPAEVLQLLRYHAVQRVINPDSLPPEHYLTTPDMVAALPTSAAGSGLEVLFQGPGSGTGEKLLCRSVWSKRSGVGSFDTAVARCRHGEEMFSCSSYSPNGVHAGERIEIRDGQKVCEAHHGIGGQGVYAVARCCTGSRVKCHASASLHVGIDAECPSQEFQLTGCSSHYIRSQDVAQPSWPLHSNRKACPAGEGGTSHAFCCHAPNLECHLIEHHQSEFTKQVEVSCEDSWTLTGCNAVSHGSVTHAAYTRGNTCVIQMFGGDKGAAAIAICCRYRPLDQQSNNNHEQNTGGLVPRGSHHHHHHSAWSHPQFEK

SEQ ID NO: 8 - protein, 697 aa, Artificial Sequence
  synthetic
MHLVLVLCLAALAACDYSEDKEVKAPQLDHPDPGTERVAELLRCTKSVWRIPEQYLVVLREGTRDSHVQRTVSTLRAQAARRGHAIHIMHTYSGVFHGFLIKMSSEVLPMALKLPHVAYIEEDSSIFAQSIPWNLQRIIQTKHETGKYTPPNDGAQVTVFLLDTSVQTDHREIEGKVMVTDFNSMPKEDGTRFHRSASKCESHGTHIAGVLSGRDAGVARGVSVNTVRVLNCQGRGTVSGALAGLEYIRASLQAQPVSPVIILLPFVGGFSRTLNTACREMVHSGAVLIAAAGNYQDDACMYSPASEPEVITVGASNAADRPLSSGTTGTNLGRCVDVFAPGEDIISASGDCSTCFVSMSGTSQSAAHAAGIAAVLLNAYPSASPAEVLQLLRYHAVQRVINPDSLPPEHYLTTPDMVAALPTSAATGSGLEVLFQGPGSGGEKLLCRSVWSKRSGVGSFDTAVARCRHGEEMFSCSSYSPNGVHAGERIEIRDGQKVCEAHHGIGGQGVYAVARCCTGSRVKCHASASLHVGIDAECPSQEFQLTGCSSHYIRSQDVAQPSWPLHSNRKACPAGEGGTSHAFCCHAPNLECHLIEHHQSEFTKQVEVSCEDSWTLTGCNAVSHGSVTHAAYTRGNTCVIQMFGGDKGAAAIAICCRYRPLDQQSNNNHEQNTGGLVPRGSHHHHHHSAWSHPQFEK

SEQ ID NO: 9 - protein, 697 aa, Artificial Sequence
  synthetic
MHLVLVLCLAALAACDYSEDKEVKAPQLDHPDPGTERVAELLRCTKSVWRIPEQYLVVLREGTRDSHVQRTVSTLRAQAARRGHAIHIMHTYSGVFHGFLIKMSSEVLPMALKLPHVAYIEEDSSIFAQSIPWNLQRIIQTKHETGKYTPPNDGAQVTVFLLDTSVQTDHREIEGKVMVTDFNSMPKEDGTRFHRSASKCESHGTHIAGVLSGRDAGVARGVSVNTVRVLNCQGRGTVSGALAGLEYIRASLQAQPVSPVIILLPFVGGFSRTLNTACREMVHSGAVLIAAAGNYQDDACMYSPASEPEVITVGASNAADRPLSSGTTGTNLGRCVDVFAPGEDIISASGDCSTCFVSMSGTSQSAAHAAGIAAVLLNAYPSASPAEVLQLLRYHAVQRVINPDSLPPEHYLTTPDMVAALPTSAATGGSGLEVLFQGPGSGEKLLCRSVWSKRSGVGSFDTAVARCRHGEEMFSCSSYSPNGVHAGERIEIRDGQKVCEAHHGIGGQGVYAVARCCTGSRVKCHASASLHVGIDAECPSQEFQLTGCSSHYIRSQDVAQPSWPLHSNRKACPAGEGGTSHAFCCHAPNLECHLIEHHQSEFTKQVEVSCEDSWTLTGCNAVSHGSVTHAAYTRGNTCVIQMFGGDKGAAAIAICCRYRPLDQQSNNNHEQNTGGLVPRGSHHHHHHSAWSHPQFEK

SEQ ID NO: 10 - protein, 701 aa, Artificial Sequence
  synthetic
MHLVLVLCLAALAACDYSEDKEVKAPQLDHPDPGTERVAELLRCTKSVWRIPEQYLVVLREGTRDSHVQRTVSTLRAQAARRGHAIHIMHTYSGVFHGFLIKMSSEVLPMALKLPHVAYIEEDSSIFAQSIPWNLQRIIQTKHETGKYTPPNDGAQVTVFLLDTSVQTDHREIEGKVMVTDFNSMPKEDGTRFHRSASKCESHGTHIAGVLSGRDAGVARGVSVNTVRVLNCQGRGTVSGALAGLEYIRASLQAQPVSPVIILLPFVGGFSRTLNTACREMVHSGAVLIAAAGNYQDDACMYSPASEPEVITVGASNAADRPLSSGTTGTNLGRCVDVFAPGEDIISASGDCSTCFVSMSGTSQSAAHAAGIAAVLLNAYPSASPAEVLQLLRYHAVQRVINPDSLPPEHYLTTPDMVAALPTSAATGEKLLCRSVWSKRSGVGSFDTAVARCRHGEEMFSCSSYSPNGVHAGERIEIRDGQKVCEAHHGIGGQGVYAVARCCTGSRVKCHASASLHVGIDAECPSQEFQLTGCSSHYIRSQDVAQPSWPLHSNRKACPAGEGGTSHAFCCHAPNLECHLIEHHQSEFTKQVEVSCEDSWTLTGCNAVSHGSVTHAAYTRGNTCVIQMFGGDKGAAAIAICCRYRPLDQQSNNNHEQNTSLVRQYIKANSKFIGITEGGLVPRGSHHHHHHSAWSHPQFEK

SEQ ID NO: 11 - protein, 708 aa, Artificial Sequence
  synthetic
MHLVLVLCLAALAACDYSEDKEVKAPQLDHPDPGTERVAELLRCTKSVWRIPEQYLVVLREGTRDSHVQRTVSTLRAQAARRGHAIHIMHTYSGVFHGFLIKMSSEVLPMALKLPHVAYIEEDSSIFAQSIPWNLQRIIQTKHETGKYTPPNDGAQVTVFLLDTSVQTDHREIEGKVMVTDFNSMPKEDGTRFHRSASKCESHGTHIAGVLSGRDAGVARGVSVNTVRVLNCQGRGTVSGALAGLEYIRASLQAQPVSPVIILLPFVGGFSRTLNTACREMVHSGAVLIAAAGNYQDDACMYSPASEPEVITVGASNAADRPLSSGTTGTNLGRCVDVFAPGEDIISASGDCSTCFVSMSGTSQSAAHAAGIAAVLLNAYPSASPAEVLQLLRYHAVQRVINPDSLPPEHYLTTPDMVAALPTSAATGEKLLCRSVWSKRSGVGSFDTAVARCRHGEEMFSCSSYSPNGVHAGERIEIRDGQKVCEAHHGIGGQGVYAVARCCTGSRVKCHASASLHVGIDAECPSQEFQLTGCSSHYIRSQDVAQPSWPLHSNRKACPAGEGGTSHAFCCHAPNLECHLIEHHQSEFTKQVEVSCEDSWTLTGCNAVSHGSVTHAAYTRGNTCVIQMFGGDKGAAAIAICCRYRPLDQQSNNNHEQNTSLVRFNNFTVSFWLRVPKVSASHLEGGLVPRGSHHHHHHSAWSHPQFEK

SEQ ID NO: 12 - protein, 699 aa, Artificial Sequence
  synthetic
MHLVLVLCLAALAACDYSEDKEVKAPQLDHPDPGTERVAELLRCTKSVWRIPEQYLVVLREGTRDSHVQRTVSTLRAQAARRGHAIHIMHTYSGVFHGFLIKMSSEVLPMALKLPHVAYIEEDSSIFAQSIPWNLQRIIQTKHETGKYTPPNDGAQVTVFLLDTSVQTDHREIEGKVMVTDFNSMPKEDGTRFHRSASKCESHGTHIAGVLSGRDAGVARGVSVNTVRVLNCQGRGTVSGALAGLEYIRASLQAQPVSPVIILLPFVGGFSRTLNTACREMVHSGAVLIAAAGNYQDDACMYSPASEPEVITVGASNAADRPLSSGTTGTNLGRCVDVFAPGEDIISASGDCSTCFVSMSGTSQSAAHAAGIAAVLLNAYPSASPAEVLQLLRYHAVQRVINPDSLPPEHYLTTPDMVAALPTSAATGEKLLCRSVWSKRSGVGSFDTAVARCRHGEEMFSCSSYSPNGVHAGERIEIRDGQKVCEAHHGIGGQGVYAVARCCTGSRVKCHASASLHVGIDAECPSQEFQLTGCSSHYIRSQDVAQPSWPLHSNRKACPAGEGGTSHAFCCHAPNLECHLIEHHQSEFTKQVEVSCEDSWTLTGCNAVSHGSVTHAAYTRGNTCVIQMFGGDKGAAAIAICCRYRPLDQQSNNNHEQNTSLVRGQIGNDPNRDILGGLVPRGSHHHHHHSAWSHPQFEK

SEQ ID NO: 13 - protein, 683 aa, Artificial Sequence
  synthetic
MHLVLVLCLAALAACDYSEDQEVKAPQLDHPDPGTERVAELLRCTKSVWRIPEQYLVVLREGTRDSHVQRTVSTLRAQAARRGHAIHIMHTYSGVFHGFLIKMSSEVLPMALKLPHVAYIEEDSSIFAQSIPWNLQRIIQTKHETGKYTPPNDGAQVTVFLLDTSVQTDHREIEGKVMVTDFNSMPKEDGTRFHQSASKCESHGTHIAGVLSGRDAGVARGVSVNTVRVLNCQGRGTVSGALAGLEYIRASLQAQPVSPVIILLPFVGGFSRTLNTACREMVHSGAVLIAAAGNYQDDACMYSPASEPEVITVGASNAADRPLSSGTTGTNLGRCVDVFAPGEDIISASGDCSTCFVSMSGTSQSAAHAAGIAAVLLNAYPSASPAEVLQLLRYHAVQRVINPDSLPPEHYLTTPDMVAALPTSAATGEKLLCRSVWSKRSGVGSFDTAVARCRHGEEMFSCSSYSPNGVHAGERIEIRDGQKVCEAHHGIGGQGVYAVARCCTGSRVKCHASASLHVGIDAECPSQEFQLTGCSSHYIRSQDVAQPSWPLHSNRKACPAGEGGTSHAFCCHAPNLECHLIEHHQSEFTKQVEVSCEDSWTLTGCNAVSHGSVTHAAYTRGNTCVIQMFGGDKGAAAIAICCRYRPLDQQSNNNHEQNTGGLVPRGSHHHHHHSAWSHPQFEK

SEQ ID NO: 14 - protein, 683 aa, Artificial Sequence
  synthetic
MHLVLVLCLAALAACDYSEDQEVKAPQLDHPDPGTERVAELLRCTKSVWRIPEQYLVVLREGTRDSHVQRTVSTLRAQAARRGHAIHIMHTYSGVFHGFLIKMSSEVLPMALKLPHVAYIEEDSSIFAQSIPWNLQRIIQTKHETGKYTPPNDGAQVTVFLLDTSVQTDHREIEGKVMVTDFNSMPKEDGTRFHESASKCESHGTHIAGVLSGRDAGVARGVSVNTVRVLNCQGRGTVSGALAGLEYIRASLQAQPVSPVIILLPFVGGFSRTLNTACREMVHSGAVLIAAAGNYQDDACMYSPASEPEVITVGASNAADRPLSSGTTGTNLGRCVDVFAPGEDIISASGDCSTCFVSMSGTSQSAAHAAGIAAVLLNAYPSASPAEVLQLLRYHAVQRVINPDSLPPEHYLTTPDMVAALPTSAATGEKLLCRSVWSKRSGVGSFDTAVARCRHGEEMFSCSSYSPNGVHAGERIEIRDGQKVCEAHHGIGGQGVYAVARCCTGSRVKCHASASLHVGIDAECPSQEFQLTGCSSHYIRSQDVAQPSWPLHSNRKACPAGEGGTSHAFCCHAPNLECHLIEHHQSEFTKQVEVSCEDSWTLTGCNAVSHGSVTHAAYTRGNTCVIQMFGGDKGAAAIAICCRYRPLDQQSNNNHEQNTGGLVPRGSHHHHHHSAWSHPQFEK

SEQ ID NO: 15 - protein, 557 aa, Artificial Sequence
  synthetic
SIPWNLQRIIQTKHETGKYTPPNDGAQVTVFLLATSVQTDHREIEGKVMVTDFNSMPKEDGTRFHRSASKCESHGTHIAGVLSGRDAGVARGVSVNTVRVLNCQGRGTVSGALAGLEYIRASLQAQPVSPVIILLPFVGGFSRTLNTACREMVHSGAVLIAAAGNYQDDACMYSPASEPEVITVGASNAADRPLSSGTTGTNLGRCVDVFAPGEDIISASGDCSTCFVSMSGTSQSAAHAAGIAAVLLNAYPSASPAEVLQLLRYHAVQRVINPDSLPPEHYLTTPDMVAALPTSAATGEKLLCRSVWSKRSGVGSFDTAVARCRHGEEMFSCSSYSPNGVHAGERIEIRDGQKVCEAHHGIGGQGVYAVARCCTGSRVKCHASASLHVGIDAECPSQEFQLTGCSSHYIRSQDVAQPSWPLHSNRKACPAGEGGTSHAFCCHAPNLECHLIEHHQSEFTKQVEVSCEDSWTLTGCNAVSHGSVTHAAYTRGNTCVIQMFGGDKGAAAIAICCRYRPLDQQSNNNHEQNTGGLEVLFQGPGHHHHHHSAWSHPQFEK

SEQ ID NO: 16 - protein, 557 aa, Artificial Sequence
  synthetic
SIPWNLQRIIQTKHETGKYTPPNDGAQVTVFLLDTSVQTDHREIEGKVMVTDFNSMPKEDGTRFHRSASKCESAGTHIAGVLSGRDAGVARGVSVNTVRVLNCQGRGTVSGALAGLEYIRASLQAQPVSPVIILLPFVGGFSRTLNTACREMVHSGAVLIAAAGNYQDDACMYSPASEPEVITVGASNAADRPLSSGTTGTNLGRCVDVFAPGEDIISASGDCSTCFVSMSGTSQSAAHAAGIAAVLLNAYPSASPAEVLQLLRYHAVQRVINPDSLPPEHYLTTPDMVAALPTSAATGEKLLCRSVWSKRSGVGSFDTAVARCRHGEEMFSCSSYSPNGVHAGERIEIRDGQKVCEAHHGIGGQGVYAVARCCTGSRVKCHASASLHVGIDAECPSQEFQLTGCSSHYIRSQDVAQPSWPLHSNRKACPAGEGGTSHAFCCHAPNLECHLIEHHQSEFTKQVEVSCEDSWTLTGCNAVSHGSVTHAAYTRGNTCVIQMFGGDKGAAAIAICCRYRPLDQQSNNNHEQNTGGLEVLFQGPGHHHHHHSAWSHPQFEK

SEQ ID NO: 17 - protein, 557 aa, Artificial Sequence
  synthetic
SIPWNLQRIIQTKHETGKYTPPNDGAQVTVFLLDTSVQTDHREIEGKVMVTDFNSMPKEDGTRFHRSASKCESHGTHIAGVLSGRDAGVARGVSVNTVRVLNCQGRGTVSGALAGLEYIRASLQAQPVSPVIILLPFVGGFSRTLNTACREMVHSGAVLIAAAGNYQDDACMYSPASEPEVITVGASNAADRPLSSGTTGTNLGRCVDVFAPGEDIISASGDCSTCFVSMSGTAQSAAHAAGIAAVLLNAYPSASPAEVLQLLRYHAVQRVINPDSLPPEHYLTTPDMVAALPTSAATGEKLLCRSVWSKRSGVGSFDTAVARCRHGEEMFSCSSYSPNGVHAGERIEIRDGQKVCEAHHGIGGQGVYAVARCCTGSRVKCHASASLHVGIDAECPSQEFQLTGCSSHYIRSQDVAQPSWPLHSNRKACPAGEGGTSHAFCCHAPNLECHLIEHHQSEFTKQVEVSCEDSWTLTGCNAVSHGSVTHAAYTRGNTCVIQMFGGDKGAAAIAICCRYRPLDQQSNNNHEQNTGGLEVLFQGPGHHHHHHSAWSHPQFEK

SEQ ID NO: 18 - protein, 557 aa, Artificial Sequence
  synthetic
SIPWNLQRIIQTKHETGKYTPPNDGAQVTVFLLDTSVQTDHREIEGKVMVTDFNSMPKEDGTRFHRSASKCESHGTHIAGVLSGRDAGVARGVSVNTVRVLNCQGRGTVSGALAGLEYIRASLQAQPVSPVIILLPFVGGFSRTLNTACREMVHSGAVLIAAAGNYQDDACMYSPASEPEVITVGASNAADRPLSSGTTGTNLGRCVDVFAPGEDIISASGDCSTCFVSMSGTTQSAAHAAGIAAVLLNAYPSASPAEVLQLLRYHAVQRVINPDSLPPEHYLTTPDMVAALPTSAATGEKLLCRSVWSKRSGVGSFDTAVARCRHGEEMFSCSSYSPNGVHAGERIEIRDGQKVCEAHHGIGGQGVYAVARCCTGSRVKCHASASLHVGIDAECPSQEFQLTGCSSHYIRSQDVAQPSWPLHSNRKACPAGEGGTSHAFCCHAPNLECHLIEHHQSEFTKQVEVSCEDSWTLTGCNAVSHGSVTHAAYTRGNTCVIQMFGGDKGAAAIAICCRYRPLDQQSNNNHEQNTGGLEVLFQGPGHHHHHHSAWSHPQFEK

SEQ ID NO: 19 - protein, 557 aa, Artificial Sequence
  synthetic
SIPWNLQRIIQTKHETGKYTPPNDGAQVTVFLLDTSVQTDHREIEGKVMVTDFNSMPKEDGTRFHRSASKCESHGTHIAGVLSGRDAGVARGVSVNTVRVLNCQGRGTVSGALAGLEYIRASLQAQPVSPVIILLPFVGGFSRTLNTACREMVHSGAVLIAAAGLYQDDACMYSPASEPEVITVGASNAADRPLSSGTTGTNLGRCVDVFAPGEDIISASGDCSTCFVSMSGTTQSAAHAAGIAAVLLNAYPSASPAEVLQLLRYHAVQRVINPDSLPPEHYLTTPDMVAALPTSAATGEKLLCRSVWSKRSGVGSFDTAVARCRHGEEMFSCSSYSPNGVHAGERIEIRDGQKVCEAHHGIGGQGVYAVARCCTGSRVKCHASASLHVGIDAECPSQEFQLTGCSSHYIRSQDVAQPSWPLHSNRKACPAGEGGTSHAFCCHAPNLECHLIEHHQSEFTKQVEVSCEDSWTLTGCNAVSHGSVTHAAYTRGNTCVIQMFGGDKGAAAIAICCRYRPLDQQSNNNHEQNTGGLEVLFQGPGHHHHHHSAWSHPQFEK

SEQ ID NO: 20 - protein, 686 aa, Artificial Sequence
  synthetic
MHLVLVLCLAALAACDYSEDKEVKAPQLDHPDPGTERVAELLRCTKSVWRIPEQYLVVLREGTRDSHVQRTVSTLRAQAARRGHAIHIMHTYSGVFHGFLIKMSSEVLPMALKLPHVAYIEEDSSIFAQSIPWNLQRIIQTKHETGKYTPPNDGAQVTVFLLATSVQTDHREIEGKVMVTDFNSMPKEDGTRFHRSASKCESHGTHIAGVLSGRDAGVARGVSVNTVRVLNCQGRGTVSGALAGLEYIRASLQAQPVSPVIILLPFVGGFSRTLNTACREMVHSGAVLIAAAGNYQDDACMYSPASEPEVITVGASNAADRPLSSGTTGTNLGRCVDVFAPGEDIISASGDCSTCFVSMSGTSQSAAHAAGIAAVLLNAYPSASPAEVLQLLRYHAVQRVINPDSLPPEHYLTTPDMVAALPTSAATGEKLLCRSVWSKRSGVGSFDTAVARCRHGEEMFSCSSYSPNGVHAGERIEIRDGQKVCEAHHGIGGQGVYAVARCCTGSRVKCHASASLHVGIDAECPSQEFQLTGCSSHYIRSQDVAQPSWPLHSNRKACPAGEGGTSHAFCCHAPNLECHLIEHHQSEFTKQVEVSCEDSWTLTGCNAVSHGSVTHAAYTRGNTCVIQMFGGDKGAAAIAICCRYRPLDQQSNNNHEQNTGGLEVLFQGPGHHHHHHSAWSHPQFEK

SEQ ID NO: 21 - protein, 686 aa, Artificial Sequence
  synthetic
MHLVLVLCLAALAACDYSEDKEVKAPQLDHPDPGTERVAELLRCTKSVWRIPEQYLVVLREGTRDSHVQRTVSTLRAQAARRGHAIHIMHTYSGVFHGFLIKMSSEVLPMALKLPHVAYIEEDSSIFAQSIPWNLQRIIQTKHETGKYTPPNDGAQVTVFLLDTSVQTDHREIEGKVMVTDFNSMPKEDGTRFHRSASKCESAGTHIAGVLSGRDAGVARGVSVNTVRVLNCQGRGTVSGALAGLEYIRASLQAQPVSPVIILLPFVGGFSRTLNTACREMVHSGAVLIAAAGNYQDDACMYSPASEPEVITVGASNAADRPLSSGTTGTNLGRCVDVFAPGEDIISASGDCSTCFVSMSGTSQSAAHAAGIAAVLLNAYPSASPAEVLQLLRYHAVQRVINPDSLPPEHYLTTPDMVAALPTSAATGEKLLCRSVWSKRSGVGSFDTAVARCRHGEEMFSCSSYSPNGVHAGERIEIRDGQKVCEAHHGIGGQGVYAVARCCTGSRVKCHASASLHVGIDAECPSQEFQLTGCSSHYIRSQDVAQPSWPLHSNRKACPAGEGGTSHAFCCHAPNLECHLIEHHQSEFTKQVEVSCEDSWTLTGCNAVSHGSVTHAAYTRGNTCVIQMFGGDKGAAAIAICCRYRPLDQQSNNNHEQNTGGLEVLFQGPGHHHHHHSAWSHPQFEK

SEQ ID NO: 22 - protein, 686 aa, Artificial Sequence
  synthetic
MHLVLVLCLAALAACDYSEDKEVKAPQLDHPDPGTERVAELLRCTKSVWRIPEQYLVVLREGTRDSHVQRTVSTLRAQAARRGHAIHIMHTYSGVFHGFLIKMSSEVLPMALKLPHVAYIEEDSSIFAQSIPWNLQRIIQTKHETGKYTPPNDGAQVTVFLLDTSVQTDHREIEGKVMVTDFNSMPKEDGTRFHRSASKCESHGTHIAGVLSGRDAGVARGVSVNTVRVLNCQGRGTVSGALAGLEYIRASLQAQPVSPVIILLPFVGGFSRTLNTACREMVHSGAVLIAAAGNYQDDACMYSPASEPEVITVGASNAADRPLSSGTTGTNLGRCVDVFAPGEDIISASGDCSTCFVSMSGTAQSAAHAAGIAAVLLNAYPSASPAEVLQLLRYHAVQRVINPDSLPPEHYLTTPDMVAALPTSAATGEKLLCRSVWSKRSGVGSFDTAVARCRHGEEMFSCSSYSPNGVHAGERIEIRDGQKVCEAHHGIGGQGVYAVARCCTGSRVKCHASASLHVGIDAECPSQEFQLTGCSSHYIRSQDVAQPSWPLHSNRKACPAGEGGTSHAFCCHAPNLECHLIEHHQSEFTKQVEVSCEDSWTLTGCNAVSHGSVTHAAYTRGNTCVIQMFGGDKGAAAIAICCRYRPLDQQSNNNHEQNTGGLEVLFQGPGHHHHHHSAWSHPQFEK

SEQ ID NO: 23 - protein, 686 aa, Artificial Sequence
  synthetic
MHLVLVLCLAALAACDYSEDKEVKAPQLDHPDPGTERVAELLRCTKSVWRIPEQYLVVLREGTRDSHVQRTVSTLRAQAARRGHAIHIMHTYSGVFHGFLIKMSSEVLPMALKLPHVAYIEEDSSIFAQSIPWNLQRIIQTKHETGKYTPPNDGAQVTVFLLDTSVQTDHREIEGKVMVTDFNSMPKEDGTRFHRSASKCESHGTHIAGVLSGRDAGVARGVSVNTVRVLNCQGRGTVSGALAGLEYIRASLQAQPVSPVIILLPFVGGFSRTLNTACREMVHSGAVLIAAAGNYQDDACMYSPASEPEVITVGASNAADRPLSSGTTGTNLGRCVDVFAPGEDIISASGDCSTCFVSMSGTTQSAAHAAGIAAVLLNAYPSASPAEVLQLLRYHAVQRVINPDSLPPEHYLTTPDMVAALPTSAATGEKLLCRSVWSKRSGVGSFDTAVARCRHGEEMFSCSSYSPNGVHAGERIEIRDGQKVCEAHHGIGGQGVYAVARCCTGSRVKCHASASLHVGIDAECPSQEFQLTGCSSHYIRSQDVAQPSWPLHSNRKACPAGEGGTSHAFCCHAPNLECHLIEHHQSEFTKQVEVSCEDSWTLTGCNAVSHGSVTHAAYTRGNTCVIQMFGGDKGAAAIAICCRYRPLDQQSNNNHEQNTGGLEVLFQGPGHHHHHHSAWSHPQFEK

SEQ ID NO: 24 - protein, 686 aa, Artificial Sequence
  synthetic
MHLVLVLCLAALAACDYSEDKEVKAPQLDHPDPGTERVAELLRCTKSVWRIPEQYLVVLREGTRDSHVQRTVSTLRAQAARRGHAIHIMHTYSGVFHGFLIKMSSEVLPMALKLPHVAYIEEDSSIFAQSIPWNLQRIIQTKHETGKYTPPNDGAQVTVFLLDTSVQTDHREIEGKVMVTDFNSMPKEDGTRFHRSASKCESHGTHIAGVLSGRDAGVARGVSVNTVRVLNCQGRGTVSGALAGLEYIRASLQAQPVSPVIILLPFVGGFSRTLNTACREMVHSGAVLIAAAGLYQDDACMYSPASEPEVITVGASNAADRPLSSGTTGTNLGRCVDVFAPGEDIISASGDCSTCFVSMSGTTQSAAHAAGIAAVLLNAYPSASPAEVLQLLRYHAVQRVINPDSLPPEHYLTTPDMVAALPTSAATGEKLLCRSVWSKRSGVGSFDTAVARCRHGEEMFSCSSYSPNGVHAGERIEIRDGQKVCEAHHGIGGQGVYAVARCCTGSRVKCHASASLHVGIDAECPSQEFQLTGCSSHYIRSQDVAQPSWPLHSNRKACPAGEGGTSHAFCCHAPNLECHLIEHHQSEFTKQVEVSCEDSWTLTGCNAVSHGSVTHAAYTRGNTCVIQMFGGDKGAAAIAICCRYRPLDQQSNNNHEQNTGGLEVLFQGPGHHHHHHSAWSHPQFEK

SEQ ID NO: 25 - protein, 686 aa, Artificial Sequence
  synthetic
MHLVLVLCLAALAACDYSEDKEVKAPQLDHPDPGTERVAELLRCTKSVWRIPEQYLVVLREGTRDSHVQRTVSTLRAQAARRGHAIHIMHTYSGVFHGFLIKMSSEVLPMALKLPHVAYIEEDSSIFAQSIPWNLQRIIQTKHETGKYTPPNDGAQVTVFLLDTSVQTDHREIEGKVMVTDFNSMPKEDGTGFHGSASKCESHGTHIAGVLSGRDAGVARGVSVNTVRVLNCQGRGTVSGALAGLEYIRASLQAQPVSPVIILLPFVGGFSRTLNTACREMVHSGAVLIAAAGNYQDDACMYSPASEPEVITVGASNAADRPLSSGTTGTNLGRCVDVFAPGEDIISASGDCSTCFVSMSGTSQSAAHAAGIAAVLLNAYPSASPAEVLQLLRYHAVQRVINPDSLPPEHYLTTPDMVAALPTSAATGEKLLCRSVWSKRSGVGSFDTAVARCRHGEEMFSCSSYSPNGVHAGERIEIRDGQKVCEAHHGIGGQGVYAVARCCTGSRVKCHASASLHVGIDAECPSQEFQLTGCSSHYIRSQDVAQPSWPLHSNRKACPAGEGGTSHAFCCHAPNLECHLIEHHQSEFTKQVEVSCEDSWTLTGCNAVSHGSVTHAAYTRGNTCVIQMFGGDKGAAAIAICCRYRPLDQQSNNNHEQNTGGLEVLFQGPGHHHHHHSAWSHPQFEK

SEQ ID NO: 26 - protein, 686 aa, Artificial Sequence
  synthetic
MHLVLVLCLAALAACDYSEDKEVKAPQLDHPDPGTERVAELLRCTKSVWRIPEQYLVVLREGTRDSHVQRTVSTLRAQAARRGHAIHIMHTYSGVFHGFLIKMSSEVLPMALKLPHVAYIEEDSSIFAQSIPWNLQRIIQTKHETGKYTPPNDGAQVTVFLLDTSVQTDHREIEGKVMVTDFNSMPKEDGTEFHESASKCESHGTHIAGVLSGRDAGVARGVSVNTVRVLNCQGRGTVSGALAGLEYIRASLQAQPVSPVIILLPFVGGFSRTLNTACREMVHSGAVLIAAAGNYQDDACMYSPASEPEVITVGASNAADRPLSSGTTGTNLGRCVDVFAPGEDIISASGDCSTCFVSMSGTSQSAAHAAGIAAVLLNAYPSASPAEVLQLLRYHAVQRVINPDSLPPEHYLTTPDMVAALPTSAATGEKLLCRSVWSKRSGVGSFDTAVARCRHGEEMFSCSSYSPNGVHAGERIEIRDGQKVCEAHHGIGGQGVYAVARCCTGSRVKCHASASLHVGIDAECPSQEFQLTGCSSHYIRSQDVAQPSWPLHSNRKACPAGEGGTSHAFCCHAPNLECHLIEHHQSEFTKQVEVSCEDSWTLTGCNAVSHGSVTHAAYTRGNTCVIQMFGGDKGAAAIAICCRYRPLDQQSNNNHEQNTGGLEVLFQGPGHHHHHHSAWSHPQFEK

SEQ ID NO: 27 - protein, 684 aa, Artificial Sequence
  synthetic
MHLVLVLCLAALAACDYSEDKEVKAPQLDHPDPGTERVAELLRCTKSVWRIPEQYLVVLREGTRDSHVQRTVSTLRAQAARRGHAIHIMHTYSGVFHGFLIKMSSEVLPMALKLPHVAYIEEDSSIFAQSIPWNLQRIIQTKHETGKYTPPNDGAQVTVFLLDTSVQTDHREIEGKVMVTDFNSMPKEDGTFHSASKCESHGTHIAGVLSGRDAGVARGVSVNTVRVLNCQGRGTVSGALAGLEYIRASLQAQPVSPVIILLPFVGGFSRTLNTACREMVHSGAVLIAAAGNYQDDACMYSPASEPEVITVGASNAADRPLSSGTTGTNLGRCVDVFAPGEDIISASGDCSTCFVSMSGTSQSAAHAAGIAAVLLNAYPSASPAEVLQLLRYHAVQRVINPDSLPPEHYLTTPDMVAALPTSAATGEKLLCRSVWSKRSGVGSFDTAVARCRHGEEMFSCSSYSPNGVHAGERIEIRDGQKVCEAHHGIGGQGVYAVARCCTGSRVKCHASASLHVGIDAECPSQEFQLTGCSSHYIRSQDVAQPSWPLHSNRKACPAGEGGTSHAFCCHAPNLECHLIEHHQSEFTKQVEVSCEDSWTLTGCNAVSHGSVTHAAYTRGNTCVIQMFGGDKGAAAIAICCRYRPLDQQSNNNHEQNTGGLEVLFQGPGHHHHHHSAWSHPQFEK

SEQ ID NO: 28 - protein, 682 aa, Artificial Sequence
  synthetic
MHLVLVLCLAALAACDYSEDKEVKAPQLDHPDPGTERVAELLRCTKSVWRIPEQYLVVLREGTRDSHVQRTVSTLRAQAARRGHAIHIMHTYSGVFHGFLIKMSSEVLPMALKLPHVAYIEEDSSIFAQSIPWNLQRIIQTKHETGKYTPPNDGAQVTVFLLDTSVQTDHREIEGKVMVTDFNSMPKEDGTSASKCESHGTHIAGVLSGRDAGVARGVSVNTVRVLNCQGRGTVSGALAGLEYIRASLQAQPVSPVIILLPFVGGFSRTLNTACREMVHSGAVLIAAAGNYQDDACMYSPASEPEVITVGASNAADRPLSSGTTGTNLGRCVDVFAPGEDIISASGDCSTCFVSMSGTSQSAAHAAGIAAVLLNAYPSASPAEVLQLLRYHAVQRVINPDSLPPEHYLTTPDMVAALPTSAATGEKLLCRSVWSKRSGVGSFDTAVARCRHGEEMFSCSSYSPNGVHAGERIEIRDGQKVCEAHHGIGGQGVYAVARCCTGSRVKCHASASLHVGIDAECPSQEFQLTGCSSHYIRSQDVAQPSWPLHSNRKACPAGEGGTSHAFCCHAPNLECHLIEHHQSEFTKQVEVSCEDSWTLTGCNAVSHGSVTHAAYTRGNTCVIQMFGGDKGAAAIAICCRYRPLDQQSNNNHEQNTGGLEVLFQGPGHHHHHHSAWSHPQFEK

SEQ ID NO: 29 - protein, 686 aa, Artificial Sequence
  synthetic
MHLVLVLCLAALAACDYSEDKEVKAPQLDHPDPGTERVAELLRCTKSVWRIPEQYLVVLREGTRDSHVQRTVSTLRAQAARRGHAIHIMHTYSGVFHGFLIKMSSEVLPMALKLPHVAYIEEDSSIFAQSIPWNLQRIIQTKHETGKYTPPNDGAQVTVFLLDTSVQTDHREIEGKVMVTDFNSMPKEDGTGFHGSASKCESHGTHIAGVLSGRDAGVARGVSVNTVRVLNCQGRGTVSGALAGLEYIRASLQAQPVSPVIILLPFVGGFSRTLNTACREMVHSGAVLIAAAGNYQDDACMYSPASEPEVITVGASNAADRPLSSGTTGTNLGRCVDVFAPGEDIISASGDCSTCFVSMSGTSQSAAHAAGIAAVLLNAYPSASPAEVLQLLRYHAVQRVINPDSLPPEHYLTTPDMVAALPTSAATGEKLLCRSVWSKRSGVGSFDTAVARCRHGEEMFSCSSYSPNGVHAGERIEIRDGQKVCEAHHGIGGQGVYAVARCCTGSRVKCHASASLHVGIDAECPSQEFQLTGCSSHYIRSQDVAQPSWPLHSNGSACPAGEGGTSHAFCCHAPNLECHLIEHHQSEFTKQVEVSCEDSWTLTGCNAVSHGSVTHAAYTRGNTCVIQMFGGDKGAAAIAICCRYRPLDQQSNNNHEQNTGGLEVLFQGPGHHHHHHSAWSHPQFEK

SEQ ID NO: 30 - protein, 696 aa, Artificial Sequence
  synthetic
MHLVLVLCLAALAACDYSEDKEVKAPQLDHPDPGTERVAELLRCTKSVWRIPEQYLVVLREGTRDSHVQRTVSTLRAQAARRGHAIHIMHTYSGVFHGFLIKMSSEVLPMALKLPHVAYIEEDSSIFAQRARRSIPWNLQRIIQTKHETGKYTPPNKKRKRRDGAQVTVFLLATSVQTDHREIEGKVMVTDFNSMPKEDGTRFHRSASKCESHGTHIAGVLSGRDAGVARGVSVNTVRVLNCQGRGTVSGALAGLEYIRASLQAQPVSPVIILLPFVGGFSRTLNTACREMVHSGAVLIAAAGNYQDDACMYSPASEPEVITVGASNAADRPLSSGTTGTNLGRCVDVFAPGEDIISASGDCSTCFVSMSGTSQSAAHAAGIAAVLLNAYPSASPAEVLQLLRYHAVQRVINPDSLPPEHYLTTPDMVAALPTSAATGEKLLCRSVWSKRSGVGSFDTAVARCRHGEEMFSCSSYSPNGVHAGERIEIRDGQKVCEAHHGIGGQGVYAVARCCTGSRVKCHASASLHVGIDAECPSQEFQLTGCSSHYIRSQDVAQPSWPLHSNRKACPAGEGGTSHAFCCHAPNLECHLIEHHQSEFTKQVEVSCEDSWTLTGCNAVSHGSVTHAAYTRGNTCVIQMFGGDKGAAAIAICCRYRPLDQQSNNNHEQNTGGLEVLFQGPGHHHHHHSAWSHPQFEK

SEQ ID NO: 31 - protein, 696 aa, Artificial Sequence
  synthetic
MHLVLVLCLAALAACDYSEDKEVKAPQLDHPDPGTERVAELLRCTKSVWRIPEQYLVVLREGTRDSHVQRTVSTLRAQAARRGHAIHIMHTYSGVFHGFLIKMSSEVLPMALKLPHVAYIEEDSSIFAQSIRARRPWNLQRIIQTKHETGKYTPPNKKRKRRDGAQVTVFLLATSVQTDHREIEGKVMVTDFNSMPKEDGTRFHRSASKCESHGTHIAGVLSGRDAGVARGVSVNTVRVLNCQGRGTVSGALAGLEYIRASLQAQPVSPVIILLPFVGGFSRTLNTACREMVHSGAVLIAAAGNYQDDACMYSPASEPEVITVGASNAADRPLSSGTTGTNLGRCVDVFAPGEDIISASGDCSTCFVSMSGTSQSAAHAAGIAAVLLNAYPSASPAEVLQLLRYHAVQRVINPDSLPPEHYLTTPDMVAALPTSAATGEKLLCRSVWSKRSGVGSFDTAVARCRHGEEMFSCSSYSPNGVHAGERIEIRDGQKVCEAHHGIGGQGVYAVARCCTGSRVKCHASASLHVGIDAECPSQEFQLTGCSSHYIRSQDVAQPSWPLHSNRKACPAGEGGTSHAFCCHAPNLECHLIEHHQSEFTKQVEVSCEDSWTLTGCNAVSHGSVTHAAYTRGNTCVIQMFGGDKGAAAIAICCRYRPLDQQSNNNHEQNTGGLEVLFQGPGHHHHHHSAWSHPQFEK

SEQ ID NO: 32 - protein, 687 aa, Artificial Sequence
  synthetic
MHLVLVLCLAALAACDYSEDKEVKAPQLDHPDPGTERVAELLRCTKSVWRIPEQYLVVLREGTRDSHVQRTVSTLRAQAARRGHAIHIMHTYSGVFHGFLIKMSSEVLPMALKLPHVAYIEEDSSIFAQRARRSIPWNLQRIYTPPNKKRKRRDGAQVTVFLLATSVQTDHREIEGKVMVTDFNSMPKEDGTRFHRSASKCESHGTHIAGVLSGRDAGVARGVSVNTVRVLNCQGRGTVSGALAGLEYIRASLQAQPVSPVIILLPFVGGFSRTLNTACREMVHSGAVLIAAAGNYQDDACMYSPASEPEVITVGASNAADRPLSSGTTGTNLGRCVDVFAPGEDIISASGDCSTCFVSMSGTSQSAAHAAGIAAVLLNAYPSASPAEVLQLLRYHAVQRVINPDSLPPEHYLTTPDMVAALPTSAATGEKLLCRSVWSKRSGVGSFDTAVARCRHGEEMFSCSSYSPNGVHAGERIEIRDGQKVCEAHHGIGGQGVYAVARCCTGSRVKCHASASLHVGIDAECPSQEFQLTGCSSHYIRSQDVAQPSWPLHSNRKACPAGEGGTSHAFCCHAPNLECHLIEHHQSEFTKQVEVSCEDSWTLTGCNAVSHGSVTHAAYTRGNTCVIQMFGGDKGAAAIAICCRYRPLDQQSNNNHEQNTGGLEVLFQGPGHHHHHHSAWSHPQFEK

SEQ ID NO: 33 - protein, 687 aa, Artificial Sequence
  synthetic
MHLVLVLCLAALAACDYSEDKEVKAPQLDHPDPGTERVAELLRCTKSVWRIPEQYLVVLREGTRDSHVQRTVSTLRAQAARRGHAIHIMHTYSGVFHGFLIKMSSEVLPMALKLPHVAYIEEDSSIFAQSIRARRPWNLQRIYTPPNKKRKRRDGAQVTVFLLATSVQTDHREIEGKVMVTDFNSMPKEDGTRFHRSASKCESHGTHIAGVLSGRDAGVARGVSVNTVRVLNCQGRGTVSGALAGLEYIRASLQAQPVSPVIILLPFVGGFSRTLNTACREMVHSGAVLIAAAGNYQDDACMYSPASEPEVITVGASNAADRPLSSGTTGTNLGRCVDVFAPGEDIISASGDCSTCFVSMSGTSQSAAHAAGIAAVLLNAYPSASPAEVLQLLRYHAVQRVINPDSLPPEHYLTTPDMVAALPTSAATGEKLLCRSVWSKRSGVGSFDTAVARCRHGEEMFSCSSYSPNGVHAGERIEIRDGQKVCEAHHGIGGQGVYAVARCCTGSRVKCHASASLHVGIDAECPSQEFQLTGCSSHYIRSQDVAQPSWPLHSNRKACPAGEGGTSHAFCCHAPNLECHLIEHHQSEFTKQVEVSCEDSWTLTGCNAVSHGSVTHAAYTRGNTCVIQMFGGDKGAAAIAICCRYRPLDQQSNNNHEQNTGGLEVLFQGPGHHHHHHSAWSHPQFEK

SEQ ID NO: 34 - protein, 692 aa, Artificial Sequence
  synthetic
MHLVLVLCLAALAACDYSEDKEVKAPQLDHPDPGTERVAELLRCTKSVWRIPEQYLVVLREGTRDSHVQRTVSTLRAQAARRGHAIHIMHTYSGVFHGFLIKMSSEVLPMALKLPHVAYIEEDSSIFAQRARRSIPWNLQRIGGSGGYTPPNKKRKRRDGAQVTVFLLATSVQTDHREIEGKVMVTDFNSMPKEDGTRFHRSASKCESHGTHIAGVLSGRDAGVARGVSVNTVRVLNCQGRGTVSGALAGLEYIRASLQAQPVSPVIILLPFVGGFSRTLNTACREMVHSGAVLIAAAGNYQDDACMYSPASEPEVITVGASNAADRPLSSGTTGTNLGRCVDVFAPGEDIISASGDCSTCFVSMSGTSQSAAHAAGIAAVLLNAYPSASPAEVLQLLRYHAVQRVINPDSLPPEHYLTTPDMVAALPTSAATGEKLLCRSVWSKRSGVGSFDTAVARCRHGEEMFSCSSYSPNGVHAGERIEIRDGQKVCEAHHGIGGQGVYAVARCCTGSRVKCHASASLHVGIDAECPSQEFQLTGCSSHYIRSQDVAQPSWPLHSNRKACPAGEGGTSHAFCCHAPNLECHLIEHHQSEFTKQVEVSCEDSWTLTGCNAVSHGSVTHAAYTRGNTCVIQMFGGDKGAAAIAICCRYRPLDQQSNNNHEQNTGGLEVLFQGPGHHHHHHSAWSHPQFEK

SEQ ID NO: 35 - protein, 692 aa, Artificial Sequence
  synthetic
MHLVLVLCLAALAACDYSEDKEVKAPQLDHPDPGTERVAELLRCTKSVWRIPEQYLVVLREGTRDSHVQRTVSTLRAQAARRGHAIHIMHTYSGVFHGFLIKMSSEVLPMALKLPHVAYIEEDSSIFAQSIRARRPWNLQRIGGSGGYTPPNKKRKRRDGAQVTVFLLATSVQTDHREIEGKVMVTDFNSMPKEDGTRFHRSASKCESHGTHIAGVLSGRDAGVARGVSVNTVRVLNCQGRGTVSGALAGLEYIRASLQAQPVSPVIILLPFVGGFSRTLNTACREMVHSGAVLIAAAGNYQDDACMYSPASEPEVITVGASNAADRPLSSGTTGTNLGRCVDVFAPGEDIISASGDCSTCFVSMSGTSQSAAHAAGIAAVLLNAYPSASPAEVLQLLRYHAVQRVINPDSLPPEHYLTTPDMVAALPTSAATGEKLLCRSVWSKRSGVGSFDTAVARCRHGEEMFSCSSYSPNGVHAGERIEIRDGQKVCEAHHGIGGQGVYAVARCCTGSRVKCHASASLHVGIDAECPSQEFQLTGCSSHYIRSQDVAQPSWPLHSNRKACPAGEGGTSHAFCCHAPNLECHLIEHHQSEFTKQVEVSCEDSWTLTGCNAVSHGSVTHAAYTRGNTCVIQMFGGDKGAAAIAICCRYRPLDQQSNNNHEQNTGGLEVLFQGPGHHHHHHSAWSHPQFEK

SEQ ID NO: 36 - protein, 695 aa, Artificial Sequence
  synthetic
MHLVLVLCLAALAACDYSEDKEVKAPQLDHPDPGTERVAELLRCTKSVWRIPEQYLVVLREGTRDSHVQRTVSTLRAQAARRGHAIHIMHTYSGVFHGFLIKMSSEVLPMALKLPHVAYIEEDSSIFAQRARRSIPWNLQRIGGSGGYTPPNKKRKRRGSGDGAQVTVFLLATSVQTDHREIEGKVMVTDFNSMPKEDGTRFHRSASKCESHGTHIAGVLSGRDAGVARGVSVNTVRVLNCQGRGTVSGALAGLEYIRASLQAQPVSPVIILLPFVGGFSRTLNTACREMVHSGAVLIAAAGNYQDDACMYSPASEPEVITVGASNAADRPLSSGTTGTNLGRCVDVFAPGEDIISASGDCSTCFVSMSGTSQSAAHAAGIAAVLLNAYPSASPAEVLQLLRYHAVQRVINPDSLPPEHYLTTPDMVAALPTSAATGEKLLCRSVWSKRSGVGSFDTAVARCRHGEEMFSCSSYSPNGVHAGERIEIRDGQKVCEAHHGIGGQGVYAVARCCTGSRVKCHASASLHVGIDAECPSQEFQLTGCSSHYIRSQDVAQPSWPLHSNRKACPAGEGGTSHAFCCHAPNLECHLIEHHQSEFTKQVEVSCEDSWTLTGCNAVSHGSVTHAAYTRGNTCVIQMFGGDKGAAAIAICCRYRPLDQQSNNNHEQNTGGLEVLFQGPGHHHHHHSAWSHPQFEK

SEQ ID NO: 37 - protein, 695 aa, Artificial Sequence
  synthetic
MHLVLVLCLAALAACDYSEDKEVKAPQLDHPDPGTERVAELLRCTKSVWRIPEQYLVVLREGTRDSHVQRTVSTLRAQAARRGHAIHIMHTYSGVFHGFLIKMSSEVLPMALKLPHVAYIEEDSSIFAQSIRARRPWNLQRIGGSGGYTPPNKKRKRRGSGDGAQVTVFLLATSVQTDHREIEGKVMVTDFNSMPKEDGTRFHRSASKCESHGTHIAGVLSGRDAGVARGVSVNTVRVLNCQGRGTVSGALAGLEYIRASLQAQPVSPVIILLPFVGGFSRTLNTACREMVHSGAVLIAAAGNYQDDACMYSPASEPEVITVGASNAADRPLSSGTTGTNLGRCVDVFAPGEDIISASGDCSTCFVSMSGTSQSAAHAAGIAAVLLNAYPSASPAEVLQLLRYHAVQRVINPDSLPPEHYLTTPDMVAALPTSAATGEKLLCRSVWSKRSGVGSFDTAVARCRHGEEMFSCSSYSPNGVHAGERIEIRDGQKVCEAHHGIGGQGVYAVARCCTGSRVKCHASASLHVGIDAECPSQEFQLTGCSSHYIRSQDVAQPSWPLHSNRKACPAGEGGTSHAFCCHAPNLECHLIEHHQSEFTKQVEVSCEDSWTLTGCNAVSHGSVTHAAYTRGNTCVIQMFGGDKGAAAIAICCRYRPLDQQSNNNHEQNTGGLEVLFQGPGHHHHHHSAWSHPQFEK

SEQ ID NO: 38 - protein, 659 aa, Artificial Sequence
  synthetic
MHLVLVLCLAALAACDYSEDKEVKAPQLDHPKPGTERVAELLRCTKSVWRIPEQYLVVLREGTRDSHVQRTVSTLRAQAARRGHAIHIMHTYSGVFHGFLIKMSSEVLPMALKLPHVAYIEEDSSIFAQSIPWNLQRIIQTKHETGKYTPPNDGAQVTVFLLDTSVQTDHREIEGKVMVTDFNSMPKEDGTRFHQSASKCESHGTHIAGVLSGRDAGIARGVSVNTVRVLNCQGRGTVSGALAGLEYIRASLQAQPVSPVIILLPFVGGFSRTLNTACREMVHSGAVLIAAAGNYQDDACMYSPASEPQVITVGASNAADRPLSSGTTGTNLGRCVDVFAPGQDIISASGDCSTCFTSMSGTSQSAAHAAGIAAVLLNAYPSASPAEVLQLLRYHAVQRVINPDSLPPEHYLTTPDMVAALPTSAATGEKLLCRSVWSKRSGVGSFDTAVARCRHGEEMFSCSSYSPNGVHAGERIEIRDGQKVCEAHHGIGGQGVYAVARCCTGSRVKCHASASLHVGIDAECPSQEFQLTGCSSHYIRSQDVAQPSWPLHSNRKACPAGEGGTSHAFCCHAPNLECHLIEHHQSEFTKQVEVSCEDSWTLTGCNAVSHGSVTHAAYTRGNTCVIQMFGGDKGAAAIAICCRYRPLDQQSNNNHEQNT

SEQ ID NO: 39 - protein, 659 aa, Artificial Sequence
  synthetic
MHLVLVLCLAALAACDYSEDKEVKAPQLDHPKPGTERVAELLRCTKSVWRIPEQYLVVLREGTRDSHVQRTVSTLRAQAARRGHAIHIMHTYSGVFHGFLIKMSSEVLPMALKLPHVAYIEEDSSIFAQSIPWNLQRIIQTKHETGKYTPPNDGAQVTVFLLDTSVQTDHREIEGKVMVTDFNSMPKEDGTRFHQSASKCESHGTHIAGVLSGRDAGIARGVSVNTVRVLNCQGRGTVSGALAGLEYIRASLQAQPVSPVIILLPFVGGFSRTLNTACREMVHSGAVLIAAAGNYQDDACMYSPASEPQVITVGASNAADRPLSSGTTGTNLGRCVDVFAPGQDIISASGDCSTCFISMSGTSQSAAHAAGIAAVLLNAYPSASPAEVLQLLRYHAVQRVINPDSLPPEHYLTTPDMVAALPTSAATGEKLLCRSVWSKRSGVGSFDTAVARCRHGEEMFSCSSYSPNGVHAGERIEIRDGQKVCEAHHGIGGQGVYAVARCCTGSRVKCHASASLHVGIDAECPSQEFQLTGCSSHYIRSQDVAQPSWPLHSNRKACPAGEGGTSHAFCCHAPNLECHLIEHHQSEFTKQVEVSCEDSWTLTGCNAVSHGSVTHAAYTRGNTCVIQMFGGDKGAAAIAICCRYRPLDQQSNNNHEQNT

SEQ ID NO: 40 - protein, 659 aa, Artificial Sequence
  synthetic
MHLVLVLCLAALAACDYSEDKEVKAPQLDHPKPGTERVAELLRCTKSVWRIPEQYLVVLREGTRDSHVQRTVSTLRAQAARRGHAIHIMHTYSGVFHGFLIKMSSEVLPMALKLPHVAYIEEDSSIFAQSIPWNLQRIIQTKHETGKYTPPNDGAQVTVFLLDTSVQTDHREIEGKVMVTDFNSMPKEDGTRFHQSASKCESHGTHIAGVLSGRDAGIARGVSVNTVRVLNCQGRGTVSGALAGLEYIRASLQAQPVSPVIILLPFVGGFSRTLNTACREMVHSGAVLIAAAGNYQDDACMYSPASEPELITVGASNAADRPLSSGTTGTNLGRCVDVFAPGQDIISASGDCSTCFTSMSGTSQSAAHAAGIAAVLLNAYPSASPAEVLQLLRYHAVQRVINPDSLPPEHYLTTPDMVAALPTSAATGEKLLCRSVWSKRSGVGSFDTAVARCRHGEEMFSCSSYSPNGVHAGERIEIRDGQKVCEAHHGIGGQGVYAVARCCTGSRVKCHASASLHVGIDAECPSQEFQLTGCSSHYIRSQDVAQPSWPLHSNRKACPAGEGGTSHAFCCHAPNLECHLIEHHQSEFTKQVEVSCEDSWTLTGCNAVSHGSVTHAAYTRGNTCVIQMFGGDKGAAAIAICCRYRPLDQQSNNNHEQNT

SEQ ID NO: 41 - protein, 659 aa, Artificial Sequence
  synthetic
MHLVLVLCLAALAACDYSEDKEVKAPQLDHPKPGTERVAELLRCTKSVWRIPEQYLVVLREGTRDSHVQRTVSTLRAQAARRGHAIHIMHTYSGVFHGFLIKMSSEVLPMALKLPHVAYIEEDSSIFAQSIPWNLQRIIQTKHETGKYTPPNDGAQVTVFLLDTSVQTDHREIEGKVMVTDFNSMPKEDGTRFHQSASKCESHGTHIAGVLSGRDAGIARGVSVNTVRVLNCQGRGTVSGALAGLEYIRASLQAQPVSPVIILLPFVGGFSRTLNTACREMVHSGAVLIAAAGNYQDDACMYSPASEPELITVGASNAADRPLSSGTTGTNLGRCVDVFAPGQDIISASGDCSTCFISMSGTSQSAAHAAGIAAVLLNAYPSASPAEVLQLLRYHAVQRVINPDSLPPEHYLTTPDMVAALPTSAATGEKLLCRSVWSKRSGVGSFDTAVARCRHGEEMFSCSSYSPNGVHAGERIEIRDGQKVCEAHHGIGGQGVYAVARCCTGSRVKCHASASLHVGIDAECPSQEFQLTGCSSHYIRSQDVAQPSWPLHSNRKACPAGEGGTSHAFCCHAPNLECHLIEHHQSEFTKQVEVSCEDSWTLTGCNAVSHGSVTHAAYTRGNTCVIQMFGGDKGAAAIAICCRYRPLDQQSNNNHEQNT

SEQ ID NO: 42 - protein, 659 aa, Artificial Sequence
  synthetic
MHLVLVLCLAALAACDYSEDKEVKAPQLDHPKPGTERVAELLRCTKSVWRIPEQYLVVLREGTRDSHVQRTVSTLRAQAARRGHAIHIMHTYSGVFHGFLIKMSSEVLPMALKLPHVAYIEEDSSIFAQSIPWNLQRIIQTKHETGKYTPPNDGAQVTVFLLDTSVQTDHREIEGKVMVTDFNSMPKEDGTRFHQSASKCESHGTHIAGVLSGRDSGVARGVSVNTVRVLNCQGRGTVSGALAGLEYIRASLQAQPVSPVIILLPFVGGFSRTLNTACREMVHSGAVLIAAAGNYQDDACMYSPASEPQVITVGASNAADRPLSSGTTGTNLGRCVDVFAPGQDIISASGDCSTCFTSMSGTSQSAAHAAGIAAVLLNAYPSASPAEVLQLLRYHAVQRVINPDSLPPEHYLTTPDMVAALPTSAATGEKLLCRSVWSKRSGVGSFDTAVARCRHGEEMFSCSSYSPNGVHAGERIEIRDGQKVCEAHHGIGGQGVYAVARCCTGSRVKCHASASLHVGIDAECPSQEFQLTGCSSHYIRSQDVAQPSWPLHSNRKACPAGEGGTSHAFCCHAPNLECHLIEHHQSEFTKQVEVSCEDSWTLTGCNAVSHGSVTHAAYTRGNTCVIQMFGGDKGAAAIAICCRYRPLDQQSNNNHEQNT

SEQ ID NO: 43 - protein, 659 aa, Artificial Sequence
  synthetic
MHLVLVLCLAALAACDYSEDKEVKAPQLDHPKPGTERVAELLRCTKSVWRIPEQYLVVLREGTRDSHVQRTVSTLRAQAARRGHAIHIMHTYSGVFHGFLIKMSSEVLPMALKLPHVAYIEEDSSIFAQSIPWNLQRIIQTKHETGKYTPPNDGAQVTVFLLDTSVQTDHREIEGKVMVTDFNSMPKEDGTRFHQSASKCESHGTHIAGVLSGRDSGVARGVSVNTVRVLNCQGRGTVSGALAGLEYIRASLQAQPVSPVIILLPFVGGFSRTLNTACREMVHSGAVLIAAAGNYQDDACMYSPASEPQVITVGASNAADRPLSSGTTGTNLGRCVDVFAPGQDIISASGDCSTCFISMSGTSQSAAHAAGIAAVLLNAYPSASPAEVLQLLRYHAVQRVINPDSLPPEHYLTTPDMVAALPTSAATGEKLLCRSVWSKRSGVGSFDTAVARCRHGEEMFSCSSYSPNGVHAGERIEIRDGQKVCEAHHGIGGQGVYAVARCCTGSRVKCHASASLHVGIDAECPSQEFQLTGCSSHYIRSQDVAQPSWPLHSNRKACPAGEGGTSHAFCCHAPNLECHLIEHHQSEFTKQVEVSCEDSWTLTGCNAVSHGSVTHAAYTRGNTCVIQMFGGDKGAAAIAICCRYRPLDQQSNNNHEQNT

SEQ ID NO: 44 - protein, 659 aa, Artificial Sequence
  synthetic
MHLVLVLCLAALAACDYSEDKEVKAPQLDHPKPGTERVAELLRCTKSVWRIPEQYLVVLREGTRDSHVQRTVSTLRAQAARRGHAIHIMHTYSGVFHGFLIKMSSEVLPMALKLPHVAYIEEDSSIFAQSIPWNLQRIIQTKHETGKYTPPNDGAQVTVFLLDTSVQTDHREIEGKVMVTDFNSMPKEDGTRFHQSASKCESHGTHIAGVLSGRDSGVARGVSVNTVRVLNCQGRGTVSGALAGLEYIRASLQAQPVSPVIILLPFVGGFSRTLNTACREMVHSGAVLIAAAGNYQDDACMYSPASEPELITVGASNAADRPLSSGTTGTNLGRCVDVFAPGQDIISASGDCSTCFTSMSGTSQSAAHAAGIAAVLLNAYPSASPAEVLQLLRYHAVQRVINPDSLPPEHYLTTPDMVAALPTSAATGEKLLCRSVWSKRSGVGSFDTAVARCRHGEEMFSCSSYSPNGVHAGERIEIRDGQKVCEAHHGIGGQGVYAVARCCTGSRVKCHASASLHVGIDAECPSQEFQLTGCSSHYIRSQDVAQPSWPLHSNRKACPAGEGGTSHAFCCHAPNLECHLIEHHQSEFTKQVEVSCEDSWTLTGCNAVSHGSVTHAAYTRGNTCVIQMFGGDKGAAAIAICCRYRPLDQQSNNNHEQNT

SEQ ID NO: 45 - protein, 659 aa, Artificial Sequence
  synthetic
MHLVLVLCLAALAACDYSEDKEVKAPQLDHPKPGTERVAELLRCTKSVWRIPEQYLVVLREGTRDSHVQRTVSTLRAQAARRGHAIHIMHTYSGVFHGFLIKMSSEVLPMALKLPHVAYIEEDSSIFAQSIPWNLQRIIQTKHETGKYTPPNDGAQVTVFLLDTSVQTDHREIEGKVMVTDFNSMPKEDGTRFHQSASKCESHGTHIAGVLSGRDSGVARGVSVNTVRVLNCQGRGTVSGALAGLEYIRASLQAQPVSPVIILLPFVGGFSRTLNTACREMVHSGAVLIAAAGNYQDDACMYSPASEPELITVGASNAADRPLSSGTTGTNLGRCVDVFAPGQDIISASGDCSTCFISMSGTSQSAAHAAGIAAVLLNAYPSASPAEVLQLLRYHAVQRVINPDSLPPEHYLTTPDMVAALPTSAATGEKLLCRSVWSKRSGVGSFDTAVARCRHGEEMFSCSSYSPNGVHAGERIEIRDGQKVCEAHHGIGGQGVYAVARCCTGSRVKCHASASLHVGIDAECPSQEFQLTGCSSHYIRSQDVAQPSWPLHSNRKACPAGEGGTSHAFCCHAPNLECHLIEHHQSEFTKQVEVSCEDSWTLTGCNAVSHGSVTHAAYTRGNTCVIQMFGGDKGAAAIAICCRYRPLDQQSNNNHEQNT

SEQ ID NO: 46 - protein, 659 aa, Artificial Sequence
  synthetic
MHLVLVLCLAALAACDYSEDKEVKAPQLDHPQPGTERVAELLRCTKSVWRIPEQYLVVLREGTRDSHVQRTVSTLRAQAARRGHAIHIMHTYSGVFHGFLIKMSSEVLPMALKLPHVAYIEEDSSIFAQSIPWNLQRIIQTKHETGKYTPPNDGAQVTVFLLDTSVQTDHREIEGKVMVTDFNSMPKEDGTRFHQSASKCESHGTHIAGVLSGRDAGIARGVSVNTVRVLNCQGRGTVSGALAGLEYIRASLQAQPVSPVIILLPFVGGFSRTLNTACREMVHSGAVLIAAAGNYQDDACMYSPASEPQVITVGASNAADRPLSSGTTGTNLGRCVDVFAPGQDIISASGDCSTCFTSMSGTSQSAAHAAGIAAVLLNAYPSASPAEVLQLLRYHAVQRVINPDSLPPEHYLTTPDMVAALPTSAATGEKLLCRSVWSKRSGVGSFDTAVARCRHGEEMFSCSSYSPNGVHAGERIEIRDGQKVCEAHHGIGGQGVYAVARCCTGSRVKCHASASLHVGIDAECPSQEFQLTGCSSHYIRSQDVAQPSWPLHSNRKACPAGEGGTSHAFCCHAPNLECHLIEHHQSEFTKQVEVSCEDSWTLTGCNAVSHGSVTHAAYTRGNTCVIQMFGGDKGAAAIAICCRYRPLDQQSNNNHEQNT

SEQ ID NO: 47 - protein, 659 aa, Artificial Sequence
  synthetic
MHLVLVLCLAALAACDYSEDKEVKAPQLDHPQPGTERVAELLRCTKSVWRIPEQYLVVLREGTRDSHVQRTVSTLRAQAARRGHAIHIMHTYSGVFHGFLIKMSSEVLPMALKLPHVAYIEEDSSIFAQSIPWNLQRIIQTKHETGKYTPPNDGAQVTVFLLDTSVQTDHREIEGKVMVTDFNSMPKEDGTRFHQSASKCESHGTHIAGVLSGRDAGIARGVSVNTVRVLNCQGRGTVSGALAGLEYIRASLQAQPVSPVIILLPFVGGFSRTLNTACREMVHSGAVLIAAAGNYQDDACMYSPASEPQVITVGASNAADRPLSSGTTGTNLGRCVDVFAPGQDIISASGDCSTCFISMSGTSQSAAHAAGIAAVLLNAYPSASPAEVLQLLRYHAVQRVINPDSLPPEHYLTTPDMVAALPTSAATGEKLLCRSVWSKRSGVGSFDTAVARCRHGEEMFSCSSYSPNGVHAGERIEIRDGQKVCEAHHGIGGQGVYAVARCCTGSRVKCHASASLHVGIDAECPSQEFQLTGCSSHYIRSQDVAQPSWPLHSNRKACPAGEGGTSHAFCCHAPNLECHLIEHHQSEFTKQVEVSCEDSWTLTGCNAVSHGSVTHAAYTRGNTCVIQMFGGDKGAAAIAICCRYRPLDQQSNNNHEQNT

SEQ ID NO: 48 - protein, 659 aa, Artificial Sequence
  synthetic
MHLVLVLCLAALAACDYSEDKEVKAPQLDHPQPGTERVAELLRCTKSVWRIPEQYLVVLREGTRDSHVQRTVSTLRAQAARRGHAIHIMHTYSGVFHGFLIKMSSEVLPMALKLPHVAYIEEDSSIFAQSIPWNLQRIIQTKHETGKYTPPNDGAQVTVFLLDTSVQTDHREIEGKVMVTDFNSMPKEDGTRFHQSASKCESHGTHIAGVLSGRDAGIARGVSVNTVRVLNCQGRGTVSGALAGLEYIRASLQAQPVSPVIILLPFVGGFSRTLNTACREMVHSGAVLIAAAGNYQDDACMYSPASEPELITVGASNAADRPLSSGTTGTNLGRCVDVFAPGQDIISASGDCSTCFTSMSGTSQSAAHAAGIAAVLLNAYPSASPAEVLQLLRYHAVQRVINPDSLPPEHYLTTPDMVAALPTSAATGEKLLCRSVWSKRSGVGSFDTAVARCRHGEEMFSCSSYSPNGVHAGERIEIRDGQKVCEAHHGIGGQGVYAVARCCTGSRVKCHASASLHVGIDAECPSQEFQLTGCSSHYIRSQDVAQPSWPLHSNRKACPAGEGGTSHAFCCHAPNLECHLIEHHQSEFTKQVEVSCEDSWTLTGCNAVSHGSVTHAAYTRGNTCVIQMFGGDKGAAAIAICCRYRPLDQQSNNNHEQNT

SEQ ID NO: 49 - protein, 659 aa, Artificial Sequence
  synthetic
MHLVLVLCLAALAACDYSEDKEVKAPQLDHPQPGTERVAELLRCTKSVWRIPEQYLVVLREGTRDSHVQRTVSTLRAQAARRGHAIHIMHTYSGVFHGFLIKMSSEVLPMALKLPHVAYIEEDSSIFAQSIPWNLQRIIQTKHETGKYTPPNDGAQVTVFLLDTSVQTDHREIEGKVMVTDFNSMPKEDGTRFHQSASKCESHGTHIAGVLSGRDAGIARGVSVNTVRVLNCQGRGTVSGALAGLEYIRASLQAQPVSPVIILLPFVGGFSRTLNTACREMVHSGAVLIAAAGNYQDDACMYSPASEPELITVGASNAADRPLSSGTTGTNLGRCVDVFAPGQDIISASGDCSTCFISMSGTSQSAAHAAGIAAVLLNAYPSASPAEVLQLLRYHAVQRVINPDSLPPEHYLTTPDMVAALPTSAATGEKLLCRSVWSKRSGVGSFDTAVARCRHGEEMFSCSSYSPNGVHAGERIEIRDGQKVCEAHHGIGGQGVYAVARCCTGSRVKCHASASLHVGIDAECPSQEFQLTGCSSHYIRSQDVAQPSWPLHSNRKACPAGEGGTSHAFCCHAPNLECHLIEHHQSEFTKQVEVSCEDSWTLTGCNAVSHGSVTHAAYTRGNTCVIQMFGGDKGAAAIAICCRYRPLDQQSNNNHEQNT

SEQ ID NO: 50 - protein, 659 aa, Artificial Sequence
  synthetic
MHLVLVLCLAALAACDYSEDKEVKAPQLDHPQPGTERVAELLRCTKSVWRIPEQYLVVLREGTRDSHVQRTVSTLRAQAARRGHAIHIMHTYSGVFHGFLIKMSSEVLPMALKLPHVAYIEEDSSIFAQSIPWNLQRIIQTKHETGKYTPPNDGAQVTVFLLDTSVQTDHREIEGKVMVTDFNSMPKEDGTRFHQSASKCESHGTHIAGVLSGRDSGVARGVSVNTVRVLNCQGRGTVSGALAGLEYIRASLQAQPVSPVIILLPFVGGFSRTLNTACREMVHSGAVLIAAAGNYQDDACMYSPASEPQVITVGASNAADRPLSSGTTGTNLGRCVDVFAPGQDIISASGDCSTCFTSMSGTSQSAAHAAGIAAVLLNAYPSASPAEVLQLLRYHAVQRVINPDSLPPEHYLTTPDMVAALPTSAATGEKLLCRSVWSKRSGVGSFDTAVARCRHGEEMFSCSSYSPNGVHAGERIEIRDGQKVCEAHHGIGGQGVYAVARCCTGSRVKCHASASLHVGIDAECPSQEFQLTGCSSHYIRSQDVAQPSWPLHSNRKACPAGEGGTSHAFCCHAPNLECHLIEHHQSEFTKQVEVSCEDSWTLTGCNAVSHGSVTHAAYTRGNTCVIQMFGGDKGAAAIAICCRYRPLDQQSNNNHEQNT

SEQ ID NO: 51 - protein, 659 aa, Artificial Sequence
  synthetic
MHLVLVLCLAALAACDYSEDKEVKAPQLDHPQPGTERVAELLRCTKSVWRIPEQYLVVLREGTRDSHVQRTVSTLRAQAARRGHAIHIMHTYSGVFHGFLIKMSSEVLPMALKLPHVAYIEEDSSIFAQSIPWNLQRIIQTKHETGKYTPPNDGAQVTVFLLDTSVQTDHREIEGKVMVTDFNSMPKEDGTRFHQSASKCESHGTHIAGVLSGRDSGVARGVSVNTVRVLNCQGRGTVSGALAGLEYIRASLQAQPVSPVIILLPFVGGFSRTLNTACREMVHSGAVLIAAAGNYQDDACMYSPASEPQVITVGASNAADRPLSSGTTGTNLGRCVDVFAPGQDIISASGDCSTCFISMSGTSQSAAHAAGIAAVLLNAYPSASPAEVLQLLRYHAVQRVINPDSLPPEHYLTTPDMVAALPTSAATGEKLLCRSVWSKRSGVGSFDTAVARCRHGEEMFSCSSYSPNGVHAGERIEIRDGQKVCEAHHGIGGQGVYAVARCCTGSRVKCHASASLHVGIDAECPSQEFQLTGCSSHYIRSQDVAQPSWPLHSNRKACPAGEGGTSHAFCCHAPNLECHLIEHHQSEFTKQVEVSCEDSWTLTGCNAVSHGSVTHAAYTRGNTCVIQMFGGDKGAAAIAICCRYRPLDQQSNNNHEQNT

SEQ ID NO: 52 - protein, 659 aa, Artificial Sequence
  synthetic
MHLVLVLCLAALAACDYSEDKEVKAPQLDHPQPGTERVAELLRCTKSVWRIPEQYLVVLREGTRDSHVQRTVSTLRAQAARRGHAIHIMHTYSGVFHGFLIKMSSEVLPMALKLPHVAYIEEDSSIFAQSIPWNLQRIIQTKHETGKYTPPNDGAQVTVFLLDTSVQTDHREIEGKVMVTDFNSMPKEDGTRFHQSASKCESHGTHIAGVLSGRDSGVARGVSVNTVRVLNCQGRGTVSGALAGLEYIRASLQAQPVSPVIILLPFVGGFSRTLNTACREMVHSGAVLIAAAGNYQDDACMYSPASEPELITVGASNAADRPLSSGTTGTNLGRCVDVFAPGQDIISASGDCSTCFTSMSGTSQSAAHAAGIAAVLLNAYPSASPAEVLQLLRYHAVQRVINPDSLPPEHYLTTPDMVAALPTSAATGEKLLCRSVWSKRSGVGSFDTAVARCRHGEEMFSCSSYSPNGVHAGERIEIRDGQKVCEAHHGIGGQGVYAVARCCTGSRVKCHASASLHVGIDAECPSQEFQLTGCSSHYIRSQDVAQPSWPLHSNRKACPAGEGGTSHAFCCHAPNLECHLIEHHQSEFTKQVEVSCEDSWTLTGCNAVSHGSVTHAAYTRGNTCVIQMFGGDKGAAAIAICCRYRPLDQQSNNNHEQNT

SEQ ID NO: 53 - protein, 659 aa, Artificial Sequence
  synthetic
MHLVLVLCLAALAACDYSEDKEVKAPQLDHPQPGTERVAELLRCTKSVWRIPEQYLVVLREGTRDSHVQRTVSTLRAQAARRGHAIHIMHTYSGVFHGFLIKMSSEVLPMALKLPHVAYIEEDSSIFAQSIPWNLQRIIQTKHETGKYTPPNDGAQVTVFLLDTSVQTDHREIEGKVMVTDFNSMPKEDGTRFHQSASKCESHGTHIAGVLSGRDSGVARGVSVNTVRVLNCQGRGTVSGALAGLEYIRASLQAQPVSPVIILLPFVGGFSRTLNTACREMVHSGAVLIAAAGNYQDDACMYSPASEPELITVGASNAADRPLSSGTTGTNLGRCVDVFAPGQDIISASGDCSTCFISMSGTSQSAAHAAGIAAVLLNAYPSASPAEVLQLLRYHAVQRVINPDSLPPEHYLTTPDMVAALPTSAATGEKLLCRSVWSKRSGVGSFDTAVARCRHGEEMFSCSSYSPNGVHAGERIEIRDGQKVCEAHHGIGGQGVYAVARCCTGSRVKCHASASLHVGIDAECPSQEFQLTGCSSHYIRSQDVAQPSWPLHSNRKACPAGEGGTSHAFCCHAPNLECHLIEHHQSEFTKQVEVSCEDSWTLTGCNAVSHGSVTHAAYTRGNTCVIQMFGGDKGAAAIAICCRYRPLDQQSNNNHEQNT

SEQ ID NO: 54 - protein, 659 aa, Artificial Sequence
  synthetic
MHLVLVLCLAALAACDYSEDKEVKAPQLDHPKPGTERVAELLRCTKSVWRIPEQYLVVLREGTRDSHVQRTVSTLRAQAARRGHAIHIMHTYSGVFHGFLIKMSSEVLPMALKLPHVAYIEEDSSIFAQSIPWNLQRIIQTKHETGKYTPPNDGAQVTVFLLDTSVQTDHREIEGKVMVTDFNSMPKEDGTRFHRSASKCESHGTHIAGVLSGRDAGVARGVSVNTVRVLNCQGRGTVSGALAGLEYIRASLQAQPVSPVIILLPFVGGFSRTLNTACREMVHSGAVLIAAAGNYQDDACMYSPASEPEVITVGASNAADRPLSSGTTGTNLGRCVDVFAPGEDIISASGDCSTCFVSMSGTSQSAAHAAGIAAVLLNAYPSASPAEVLQLLRYHAVQRVINPDSLPPEHYLTTPDMVAALPTSAATGEKLLCRSVWSKRSGVGSFDTAVARCRHGEEMFSCSSYSPNGVHAGERIEIRDGQKVCEAHHGIGGQGVYAVARCCTGSRVKCHASASLHVGIDAECPSQEFQLTGCSSHYIRSQDVAQPSWPLHSNRKACPAGEGGTSHAFCCHAPNLECHLIEHHQSEFTKQVEVSCEDSWTLTGCNAVSHGSVTHAAYTRGNTCVIQMFGGDKGAAAIAICCRYRPLDQQSNNNHEQNT

SEQ ID NO: 55 - protein, 659 aa, Artificial Sequence
  synthetic
MHLVLVLCLAALAACDYSEDKEVKAPQLDHPQPGTERVAELLRCTKSVWRIPEQYLVVLREGTRDSHVQRTVSTLRAQAARRGHAIHIMHTYSGVFHGFLIKMSSEVLPMALKLPHVAYIEEDSSIFAQSIPWNLQRIIQTKHETGKYTPPNDGAQVTVFLLDTSVQTDHREIEGKVMVTDFNSMPKEDGTRFHRSASKCESHGTHIAGVLSGRDAGVARGVSVNTVRVLNCQGRGTVSGALAGLEYIRASLQAQPVSPVIILLPFVGGFSRTLNTACREMVHSGAVLIAAAGNYQDDACMYSPASEPEVITVGASNAADRPLSSGTTGTNLGRCVDVFAPGEDIISASGDCSTCFVSMSGTSQSAAHAAGIAAVLLNAYPSASPAEVLQLLRYHAVQRVINPDSLPPEHYLTTPDMVAALPTSAATGEKLLCRSVWSKRSGVGSFDTAVARCRHGEEMFSCSSYSPNGVHAGERIEIRDGQKVCEAHHGIGGQGVYAVARCCTGSRVKCHASASLHVGIDAECPSQEFQLTGCSSHYIRSQDVAQPSWPLHSNRKACPAGEGGTSHAFCCHAPNLECHLIEHHQSEFTKQVEVSCEDSWTLTGCNAVSHGSVTHAAYTRGNTCVIQMFGGDKGAAAIAICCRYRPLDQQSNNNHEQNT

SEQ ID NO: 56 - protein, 659 aa, Artificial Sequence
  synthetic
MHLVLVLCLAALAACDYSEDKEVKAPQLDHPDPGTERVAELLRCTKSVWRIPEQYLVVLREGTRDSHVQRTVSTLRAQAARRGHAIHIMHTYSGVFHGFLIKMSSEVLPMALKLPHVAYIEEDSSIFAQSIPWNLQRIIQTKHETGKYTPPNDGAQVTVFLLDTSVQTDHREIEGKVMVTDFNSMPKEDGTRFHRSASKCESHGTHIAGVLSGRDAGIARGVSVNTVRVLNCQGRGTVSGALAGLEYIRASLQAQPVSPVIILLPFVGGFSRTLNTACREMVHSGAVLIAAAGNYQDDACMYSPASEPEVITVGASNAADRPLSSGTTGTNLGRCVDVFAPGEDIISASGDCSTCFVSMSGTSQSAAHAAGIAAVLLNAYPSASPAEVLQLLRYHAVQRVINPDSLPPEHYLTTPDMVAALPTSAATGEKLLCRSVWSKRSGVGSFDTAVARCRHGEEMFSCSSYSPNGVHAGERIEIRDGQKVCEAHHGIGGQGVYAVARCCTGSRVKCHASASLHVGIDAECPSQEFQLTGCSSHYIRSQDVAQPSWPLHSNRKACPAGEGGTSHAFCCHAPNLECHLIEHHQSEFTKQVEVSCEDSWTLTGCNAVSHGSVTHAAYTRGNTCVIQMFGGDKGAAAIAICCRYRPLDQQSNNNHEQNT

SEQ ID NO: 57 - protein, 659 aa, Artificial Sequence
  synthetic
MHLVLVLCLAALAACDYSEDKEVKAPQLDHPDPGTERVAELLRCTKSVWRIPEQYLVVLREGTRDSHVQRTVSTLRAQAARRGHAIHIMHTYSGVFHGFLIKMSSEVLPMALKLPHVAYIEEDSSIFAQSIPWNLQRIIQTKHETGKYTPPNDGAQVTVFLLDTSVQTDHREIEGKVMVTDFNSMPKEDGTRFHRSASKCESHGTHIAGVLSGRDSGVARGVSVNTVRVLNCQGRGTVSGALAGLEYIRASLQAQPVSPVIILLPFVGGFSRTLNTACREMVHSGAVLIAAAGNYQDDACMYSPASEPEVITVGASNAADRPLSSGTTGTNLGRCVDVFAPGEDIISASGDCSTCFVSMSGTSQSAAHAAGIAAVLLNAYPSASPAEVLQLLRYHAVQRVINPDSLPPEHYLTTPDMVAALPTSAATGEKLLCRSVWSKRSGVGSFDTAVARCRHGEEMFSCSSYSPNGVHAGERIEIRDGQKVCEAHHGIGGQGVYAVARCCTGSRVKCHASASLHVGIDAECPSQEFQLTGCSSHYIRSQDVAQPSWPLHSNRKACPAGEGGTSHAFCCHAPNLECHLIEHHQSEFTKQVEVSCEDSWTLTGCNAVSHGSVTHAAYTRGNTCVIQMFGGDKGAAAIAICCRYRPLDQQSNNNHEQNT

SEQ ID NO: 58 - protein, 659 aa, Artificial Sequence
  synthetic
MHLVLVLCLAALAACDYSEDKEVKAPQLDHPDPGTERVAELLRCTKSVWRIPEQYLVVLREGTRDSHVQRTVSTLRAQAARRGHAIHIMHTYSGVFHGFLIKMSSEVLPMALKLPHVAYIEEDSSIFAQSIPWNLQRIIQTKHETGKYTPPNDGAQVTVFLLDTSVQTDHREIEGKVMVTDFNSMPKEDGTRFHRSASKCESHGTHIAGVLSGRDAGVARGVSVNTVRVLNCQGRGTVSGALAGLEYIRASLQAQPVSPVIILLPFVGGFSRTLNTACREMVHSGAVLIAAAGNYQDDACMYSPASEPQVITVGASNAADRPLSSGTTGTNLGRCVDVFAPGEDIISASGDCSTCFVSMSGTSQSAAHAAGIAAVLLNAYPSASPAEVLQLLRYHAVQRVINPDSLPPEHYLTTPDMVAALPTSAATGEKLLCRSVWSKRSGVGSFDTAVARCRHGEEMFSCSSYSPNGVHAGERIEIRDGQKVCEAHHGIGGQGVYAVARCCTGSRVKCHASASLHVGIDAECPSQEFQLTGCSSHYIRSQDVAQPSWPLHSNRKACPAGEGGTSHAFCCHAPNLECHLIEHHQSEFTKQVEVSCEDSWTLTGCNAVSHGSVTHAAYTRGNTCVIQMFGGDKGAAAIAICCRYRPLDQQSNNNHEQNT

SEQ ID NO: 59 - protein, 659 aa, Artificial Sequence
  synthetic
MHLVLVLCLAALAACDYSEDKEVKAPQLDHPDPGTERVAELLRCTKSVWRIPEQYLVVLREGTRDSHVQRTVSTLRAQAARRGHAIHIMHTYSGVFHGFLIKMSSEVLPMALKLPHVAYIEEDSSIFAQSIPWNLQRIIQTKHETGKYTPPNDGAQVTVFLLDTSVQTDHREIEGKVMVTDFNSMPKEDGTRFHRSASKCESHGTHIAGVLSGRDAGVARGVSVNTVRVLNCQGRGTVSGALAGLEYIRASLQAQPVSPVIILLPFVGGFSRTLNTACREMVHSGAVLIAAAGNYQDDACMYSPASEPELITVGASNAADRPLSSGTTGTNLGRCVDVFAPGEDIISASGDCSTCFVSMSGTSQSAAHAAGIAAVLLNAYPSASPAEVLQLLRYHAVQRVINPDSLPPEHYLTTPDMVAALPTSAATGEKLLCRSVWSKRSGVGSFDTAVARCRHGEEMFSCSSYSPNGVHAGERIEIRDGQKVCEAHHGIGGQGVYAVARCCTGSRVKCHASASLHVGIDAECPSQEFQLTGCSSHYIRSQDVAQPSWPLHSNRKACPAGEGGTSHAFCCHAPNLECHLIEHHQSEFTKQVEVSCEDSWTLTGCNAVSHGSVTHAAYTRGNTCVIQMFGGDKGAAAIAICCRYRPLDQQSNNNHEQNT

SEQ ID NO: 60 - protein, 659 aa, Artificial Sequence
  synthetic
MHLVLVLCLAALAACDYSEDKEVKAPQLDHPDPGTERVAELLRCTKSVWRIPEQYLVVLREGTRDSHVQRTVSTLRAQAARRGHAIHIMHTYSGVFHGFLIKMSSEVLPMALKLPHVAYIEEDSSIFAQSIPWNLQRIIQTKHETGKYTPPNDGAQVTVFLLDTSVQTDHREIEGKVMVTDFNSMPKEDGTRFHRSASKCESHGTHIAGVLSGRDAGVARGVSVNTVRVLNCQGRGTVSGALAGLEYIRASLQAQPVSPVIILLPFVGGFSRTLNTACREMVHSGAVLIAAAGNYQDDACMYSPASEPEVITVGASNAADRPLSSGTTGTNLGRCVDVFAPGEDIISASGDCSTCFTSMSGTSQSAAHAAGIAAVLLNAYPSASPAEVLQLLRYHAVQRVINPDSLPPEHYLTTPDMVAALPTSAATGEKLLCRSVWSKRSGVGSFDTAVARCRHGEEMFSCSSYSPNGVHAGERIEIRDGQKVCEAHHGIGGQGVYAVARCCTGSRVKCHASASLHVGIDAECPSQEFQLTGCSSHYIRSQDVAQPSWPLHSNRKACPAGEGGTSHAFCCHAPNLECHLIEHHQSEFTKQVEVSCEDSWTLTGCNAVSHGSVTHAAYTRGNTCVIQMFGGDKGAAAIAICCRYRPLDQQSNNNHEQNT

SEQ ID NO: 61 - protein, 659 aa, Artificial Sequence
  synthetic
MHLVLVLCLAALAACDYSEDKEVKAPQLDHPDPGTERVAELLRCTKSVWRIPEQYLVVLREGTRDSHVQRTVSTLRAQAARRGHAIHIMHTYSGVFHGFLIKMSSEVLPMALKLPHVAYIEEDSSIFAQSIPWNLQRIIQTKHETGKYTPPNDGAQVTVFLLDTSVQTDHREIEGKVMVTDFNSMPKEDGTRFHRSASKCESHGTHIAGVLSGRDAGVARGVSVNTVRVLNCQGRGTVSGALAGLEYIRASLQAQPVSPVIILLPFVGGFSRTLNTACREMVHSGAVLIAAAGNYQDDACMYSPASEPEVITVGASNAADRPLSSGTTGTNLGRCVDVFAPGEDIISASGDCSTCFISMSGTSQSAAHAAGIAAVLLNAYPSASPAEVLQLLRYHAVQRVINPDSLPPEHYLTTPDMVAALPTSAATGEKLLCRSVWSKRSGVGSFDTAVARCRHGEEMFSCSSYSPNGVHAGERIEIRDGQKVCEAHHGIGGQGVYAVARCCTGSRVKCHASASLHVGIDAECPSQEFQLTGCSSHYIRSQDVAQPSWPLHSNRKACPAGEGGTSHAFCCHAPNLECHLIEHHQSEFTKQVEVSCEDSWTLTGCNAVSHGSVTHAAYTRGNTCVIQMFGGDKGAAAIAICCRYRPLDQQSNNNHEQNT

SEQ ID NO: 62 - protein, 659 aa, Artificial Sequence
  synthetic
MHLVLVLCLAALAACDYSEDKEVKAPQLDHPDPGTERVAELLRCTKSVWRIPEQYLVVLREGTRDSHVQRTVSTLRAQAARRGHAIHIMHTYSGVFHGFLIKMSSEVLPMALKLPHVAYIEEDSSIFAQSIPWNLQRIIQTKHETGKYTPPNDGAQVTVFLLDTSVQTDHREIEGKVMVTDFNSMPKEDGTRFHQSASKCESHGTHIAGVLSGRDAGVARGVSVNTVRVLNCQGRGTVSGALAGLEYIRASLQAQPVSPVIILLPFVGGFSRTLNTACREMVHSGAVLIAAAGNYQDDACMYSPASEPEVITVGASNAADRPLSSGTTGTNLGRCVDVFAPGEDIISASGDCSTCFVSMSGTSQSAAHAAGIAAVLLNAYPSASPAEVLQLLRYHAVQRVINPDSLPPEHYLTTPDMVAALPTSAATGEKLLCRSVWSKRSGVGSFDTAVARCRHGEEMFSCSSYSPNGVHAGERIEIRDGQKVCEAHHGIGGQGVYAVARCCTGSRVKCHASASLHVGIDAECPSQEFQLTGCSSHYIRSQDVAQPSWPLHSNRKACPAGEGGTSHAFCCHAPNLECHLIEHHQSEFTKQVEVSCEDSWTLTGCNAVSHGSVTHAAYTRGNTCVIQMFGGDKGAAAIAICCRYRPLDQQSNNNHEQNT

SEQ ID NO: 63 - protein, 659 aa, Artificial Sequence
  synthetic
MHLVLVLCLAALAACDYSEDKEVKAPQLDHPDPGTERVAELLRCTKSVWRIPEQYLVVLREGTRDSHVQRTVSTLRAQAARRGHAIHIMHTYSGVFHGFLIKMSSEVLPMALKLPHVAYIEEDSSIFAQSIPWNLQRIIQTKHETGKYTPPNDGAQVTVFLLDTSVQTDHREIEGKVMVTDFNSMPKEDGTRFHRSASKCESHGTHIAGVLSGRDAGVARGVSVNTVRVLNCQGRGTVSGALAGLEYIRASLQAQPVSPVIILLPFVGGFSRTLNTACREMVHSGAVLIAAAGNYQDDACMYSPASEPEVITVGASNAADRPLSSGTTGTNLGRCVDVFAPGKDIISASGDCSTCFVSMSGTSQSAAHAAGIAAVLLNAYPSASPAEVLQLLRYHAVQRVINPDSLPPEHYLTTPDMVAALPTSAATGEKLLCRSVWSKRSGVGSFDTAVARCRHGEEMFSCSSYSPNGVHAGERIEIRDGQKVCEAHHGIGGQGVYAVARCCTGSRVKCHASASLHVGIDAECPSQEFQLTGCSSHYIRSQDVAQPSWPLHSNRKACPAGEGGTSHAFCCHAPNLECHLIEHHQSEFTKQVEVSCEDSWTLTGCNAVSHGSVTHAAYTRGNTCVIQMFGGDKGAAAIAICCRYRPLDQQSNNNHEQNT

SEQ ID NO: 64 - protein, 667 aa, Artificial Sequence
  synthetic
MIASKKTTDFWKMSFFLVMCLAALAACDNPEEKPVNAPVIVHPPPPRTERVAEFLRCTKSAWCIPDQYLVVLQEGAHDSHVQRTVSTLRAQAARSRHTIHITHTYSGAFCGFLIKMSSEVLPMALKLPHVAYIEEDSSIFAQSIPWNLQRIMQTKHETGKYTPPNDGAQVTVFLLDTSIQTDHREIEGKVMVTDFNSVPKEDGTRFHRSASKCESHGTHIAGVLSGRDAGVARGVGVNTVRVLNCQGRGTVSGALAGLEYIRASLQAQPVRPVIILLPFVGGFSRTLNIACQEMVHSGAVLIAAAGNYQDDACMYSPASEPEVITIGATNAADQLLSSGTTGTNLGRCVDVFAPGEDIISASGDCSTCFVSKRGTSQSAAHAAGIAAVLLNAHPSASPAEVLQLLRYHSVQHVINPDSLPPEHYHTTPDMVAALPKSAATGETLLCRSVWSKRSGVGSFDTAVAHCRRGEEMFSCSSYSPNGVHAGEKIEIRDGQKVCESHHAIGGHGVYAVARCCTGSRVKCHASASLHVGVDAECPSQEYQLTGCSSHYIRSHDTAQPSRLLHSNRKACPAGEGGTSHASCCRAPNLECHLIEFTRQVEVSCEDSWTLTWCIAASHGSVTHGAYTRGNTCVIQMFGEHKGTAALAICCRFRPLDQQSNKNHEQNT

SEQ ID NO: 65 - protein, 667 aa, Artificial Sequence
  synthetic
MIASKKTTDFWKMSFFLVMCLAALAACDNPEEKPVNAPVIVHPPPPRTERVAEFLRCTKSAWCIPDQYLVVLQEGAHDSHVQRTVSTLRAQAARSRHTIHITHTYSGAFCGFLIKMSSEVLPMALKLPHVAYIEEDSSIFAQSIPWNLQRIMQTKHETGKYTPPNDGAQVTVFLLDTSIQTDHREIEGKVMVTDFNSVPKEDGTRFHQSASKCESHGTHIAGVLSGRDSGVARGVGVNTVRVLNCQGRGTVSGALAGLEYIRASLQAQPVRPVIILLPFVGGFSRTLNIACQEMVHSGAVLIAAAGNYQDDACMYSPASEPEVITIGATNAADQLLSSGTTGTNLGRCVDVFAPGEDIISASGDCSTCFTSKRGTSQSAAHAAGIAAVLLNAHPSASPAEVLQLLRYHSVQHVINPDSLPPEHYHTTPDMVAALPKSAATGETLLCRSVWSKRSGVGSFDTAVAHCRRGEEMFSCSSYSPNGVHAGEKIEIRDGQKVCESHHAIGGHGVYAVARCCTGSRVKCHASASLHVGVDAECPSQEYQLTGCSSHYIRSHDTAQPSRLLHSNRKACPAGEGGTSHASCCRAPNLECHLIEFTRQVEVSCEDSWTLTWCIAASHGSVTHGAYTRGNTCVIQMFGEHKGTAALAICCRFRPLDQQSNKNHEQNT

SEQ ID NO: 66 - protein, 659 aa, Artificial Sequence
  synthetic
MRRTSAWVGWVLCLCTSLAASAQDYPDGDEMILDMFSEDGTKPEPRAVPTAEFLKCNKAAWRVHGQYLVVLRQGTHGSHVQRTIRRLRAKAARRGQLLEILHTYSAALHGFMVKMSSDVLHLALKLPQVHYIEEDSSIFAQSIPWNLQRLLQPHGGSSESGTYRPPNDGGMALVYLLDGSVQSDHREVEGRVLITDFNSVPKEDGTRFHQSASKCESHGTHIAGVVTGRDAGVARGAGVNLVRILNCQGKGSVSGALAGLEYIQSTLLARPVDAVVVLLPFSGGFSRSLNAACRDMVAKGAVVIAAAGNYRDDACFYSPASEPEVITVGAVNSVDQLMSQGAGGTNFGRCIDVFAPGEDIISASGDCSTCFTSRSGTSQSAAHAAGIAAVILSSNQQVSPVQVMQMMLHYSSSHTINFLSLPDSHRLISPNLVAAMPPANSAKELLCRSVWSKRSGVTSSDQAVSRCRLGEEMMSCSSYTLDGVHAGETISESSGQMECVAFNALGGEGVYAVARCCVIGGLQCQVHASPECVATQHHLTGCTLRSAAGISADSRPHGSDRRRCVGSSGATSHAVCCHAPSLECRLMEKISADKDQVELSCPSGWTLTDCSAVSPGSVILAPVAKGNSCHVGSASGAGGAAGVVVCCRVRQPEQRRASP

SEQ ID NO: 67 - protein, 597 aa, Artificial Sequence
  synthetic
MRRTSAWVGWALCLCASLAANAQDYPEDDEMILDLIREDGTQPETGTEPAAEFLRCNKAAWRMPGKYLVILRQGTHGSHVQRTIRRLRAKAARRSYLLEILQTYSGALKGFLVKMSSDVLHLAVKLPHVHYIEEDSSIFAQSIPWNLQRLLQPRGGTSESGTYQPPNDGAMAEVYLMDGSVQTDHREIEGKVLITDFNDVPKEDGTRFHQSASKCESHGTHMAGVVTGRDAGVARGADVNLVRILNCQGKGSVSGALAGLEYIRATLLARPVEAVVVLLPFIGGFSRSLNTACRDMVANGAVVIAAAGNYRDDACMYSPASEPEVITVGAVNSADQLMSQGAGGTNVGRCVDFFAPGEDIISASGDCSTCFTSRSGTSQSAAHAAGIAAVILSSSQQMSPVHVLQTMLHHSISNTINLLSLSETHYLTTPNLVAAMPPTQRTNADGELLCRSVWSEKSGVASADRAVSRCRLGEEMLGCSSYTPDGVRVGESIAINGERMECVAYNGPGGKGVYAVARCCAIGGLRCQVHASPKPGQDAECIDPQHHLTGCTSWSTTKTLSDSRPHHGDRRRCIVKNGVASHAVCCHAPALQCLLME

SEQ ID NO: 68 - protein, 597 aa, Artificial Sequence; identical to SEQ ID NO: 67
  synthetic

SEQ ID NO: 69 - protein, 309 aa, Artificial Sequence
  synthetic
MLKKVLSCCIAATFGIYSASSLAQSSIPWGLDRIDQRNLPLDRNYNANFDGFGVTAYVIDTGVNNDHREIEGRSVSGYDGTRFHADASKCESHGTHVAGTIGGRDSGVAKNVNIVGVRVLSCSGSGTTSGVISGVDWVAQQASGPSVASMSLGGGQSTALDSAVQGAIQSGVSFMLAAGNSNADACQTSPARVPSGVTVGSTTSSDSRSSFSNWGSCVDVFAPGEDIISASYDCSTCFTSISGTSMATPHVAGVAALYLQENNGLTPLQLTGLLNSRASENKVSDTRGTTNKLLYSLADSGCEPDCGGP

SEQ ID NO: 70 - protein, 305 aa, Artificial Sequence
  synthetic
MLKKVLSCCIAATFGIYSASSLAATQTSIPWGLDRIDQRTLPLSGTFTYSNTGSGVNAYIIDTGIRVDHREIEGRATAVFDGTRFHQQASKCESHGTHVAGTVGGRDSGVAKSVRLYAVRVLSCSGSGSNSGVIAGVDWVRQNARRPAVASMSLGGGASSALDTAVNNAINAGITFALAAGNSNRDACQFSPARVTAGITVGATTSTDARASYSNYGSCLDVFAPGEDIISASIDCSTCFTSISGTSMATPHVAGVAALYLQSNPSASPATVRNAIVGQATSGVVSNAGRRSPNLLLYSNYENLY

SEQ ID NO: 71 - protein, 659 aa, Artificial Sequence
  synthetic
MHLVLVLCLAALAACDYSEDKEVKAPQLDHPKPGTERVAELLRCTKSVWRIPEQYLVVLREGTRDSHVQRTVSTLRAQAARRGHAIHIMHTYSGVFHGFLIKMSSEVLPMALKLPHVAYIEEDSSIFAQSIPWNLQRIIQTKHETGKYTPPNDGAQVTVFLLDTSVQTDHREIEGKVMVTDFNSMPKEDGTRFHQSASKCESHGTHIAGVLSGRDSGVARGVSVNTVRVLNCQGRGTVSGALAGLEYIRASLQAQPVSPVIILLPFVGGFSRTLNTACREMVHSGAVLIAAAGNYQDDACMYSPASEPEVITVGASNAADRPLSSGTTGTNLGRCVDVFAPGEDIISASGDCSTCFTSMSGTSQSAAHAAGIAAVLLNAYPSASPAEVLQLLRYHAVQRVINPDSLPPEHYLTTPDMVAALPTSAATGEKLLCRSVWSKRSGVGSFDTAVARCRHGEEMFSCSSYSPNGVHAGERIEIRDGQKVCEAHHGIGGQGVYAVARCCTGSRVKCHASASLHVGIDAECPSQEFQLTGCSSHYIRSQDVAQPSWPLHSNRKACPAGEGGTSHAFCCHAPNLECHLIEHHQSEFTKQVEVSCEDSWTLTGCNAVSHGSVTHAAYTRGNTCVIQMFGGDKGAAAIAICCRYRPLDQQSNNNHEQNT

SEQ ID NO: 72 - protein, 659 aa, Artificial Sequence
  synthetic
MHLVLVLCLAALAACDYSEDKEVKAPQLDHPQPGTERVAELLRCTKSVWRIPEQYLVVLREGTRDSHVQRTVSTLRAQAARRGHAIHIMHTYSGVFHGFLIKMSSEVLPMALKLPHVAYIEEDSSIFAQSIPWNLQRIIQTKHETGKYTPPNDGAQVTVFLLDTSVQTDHREIEGKVMVTDFNSMPKEDGTRFHQSASKCESHGTHIAGVLSGRDAGIARGVSVNTVRVLNCQGRGTVSGALAGLEYIRASLQAQPVSPVIILLPFVGGFSRTLNTACREMVHSGAVLIAAAGNYQDDACMYSPASEPEVITVGASNAADRPLSSGTTGTNLGRCVDVFAPGEDIISASGDCSTCFISMSGTSQSAAHAAGIAAVLLNAYPSASPAEVLQLLRYHAVQRVINPDSLPPEHYLTTPDMVAALPTSAATGEKLLCRSVWSKRSGVGSFDTAVARCRHGEEMFSCSSYSPNGVHAGERIEIRDGQKVCEAHHGIGGQGVYAVARCCTGSRVKCHASASLHVGIDAECPSQEFQLTGCSSHYIRSQDVAQPSWPLHSNRKACPAGEGGTSHAFCCHAPNLECHLIEHHQSEFTKQVEVSCEDSWTLTGCNAVSHGSVTHAAYTRGNTCVIQMFGGDKGAAAIAICCRYRPLDQQSNNNHEQNT

SEQ ID NO: 73 - protein, 659 aa, Artificial Sequence
  synthetic
MHLVLVLCLAALAACDYSEDKEVKAPQLDHPDPGTERVAELLRCTKSVWRIPEQYLVVLREGTRDSHVQRTVSTLRAQAARRGHAIHIMHTYSGVFHGFLIKMSSEVLPMALKLPHVAYIEEDSSIFAQSIPWNLQRIIQTKHETGKYTPPNDGAQVTVFLLDTSVQTDHREIEGKVMVTDFNSMPKEDGTRFHRSASKCESHGTHIAGVLSGRDAGVARGVSVNTVRVLNCQGRGTVSGALAGLEYIRASLQAQPVSPVIILLPFVGGFSRTLNTACREMVHSGAVLIAAAGNYQDDACMYSPASEAEVITVGASNAADRPLSSGTTGTNLGRCVDVFAPGEDIISASGDCSTCFVSMSGTSQSAAHAAGIAAVLLNAYPSASPAEVLQLLRYHAVQRVINPDSLPPEHYLTTPDMVAALPTSAATGEKLLCRSVWSKRSGVGSFDTAVARCRHGEEMFSCSSYSPNGVHAGERIEIRDGQKVCEAHHGIGGQGVYAVARCCTGSRVKCHASASLHVGIDAECPSQEFQLTGCSSHYIRSQDVAQPSWPLHSNRKACPAGEGGTSHAFCCHAPNLECHLIEHHQSEFTKQVEVSCEDSWTLTGCNAVSHGSVTHAAYTRGNTCVIQMFGGDKGAAAIAICCRYRPLDQQSNNNHEQNT

SEQ ID NO: 74 - protein, 659 aa, Artificial Sequence
  synthetic
MHLVLVLCLAALAACDYSEDKEVKAPQLDHPDPGTERVAELLRCTKSVWRIPEQYLVVLREGTRDSHVQRTVSTLRAQAARRGHAIHIMHTYSGVFHGFLIKMSSEVLPMALKLPHVAYIEEDSSIFAQSIPWNLQRIIQTKHETGKYTPPNDGAQVTVFLLDTSVQTDHREIEGKVMVTDFNSMPKEDGTRFHRSASKCESHGTHIAGVLSGRDAGVARGVSVNTVRVLNCQGRGTVSGALAGLEYIRASLQAQPVSPVIILLPFVGGFSRTLNTACREMVHSGAVLIAAAGNYQDDACMYSPASEPGVITVGASNAADRPLSSGTTGTNLGRCVDVFAPGEDIISASGDCSTCFVSMSGTSQSAAHAAGIAAVLLNAYPSASPAEVLQLLRYHAVQRVINPDSLPPEHYLTTPDMVAALPTSAATGEKLLCRSVWSKRSGVGSFDTAVARCRHGEEMFSCSSYSPNGVHAGERIEIRDGQKVCEAHHGIGGQGVYAVARCCTGSRVKCHASASLHVGIDAECPSQEFQLTGCSSHYIRSQDVAQPSWPLHSNRKACPAGEGGTSHAFCCHAPNLECHLIEHHQSEFTKQVEVSCEDSWTLTGCNAVSHGSVTHAAYTRGNTCVIQMFGGDKGAAAIAICCRYRPLDQQSNNNHEQNT

SEQ ID NO: 75 - protein, 659 aa, Artificial Sequence
  synthetic
MHLVLVLCLAALAACDYSEDKEVKAPQLDHPDPGTERVAELLRCTKSVWRIPEQYLVVLREGTRDSHVQRTVSTLRAQAARRGHAIHIMHTYSGVFHGFLIKMSSEVLPMALKLPHVAYIEEDSSIFAQSIPWNLQRIIQTKHETGKYTPPNDGAQVTVFLLDTSVQTDHREIEGKVMVTDFNSMPKEDGTRFHRSASKCESHGTHIAGVLSGRDAGVARGVSVNTVRVLNCQGRGTVSGALAGLEYIRASLQAQPVSPVIILLPFVGGFSRTLNTACREMVHSGAVLIAAAGNYQDDACMYSPASEPEVITLGASNAADRPLSSGTTGTNLGRCVDVFAPGEDIISASGDCSTCFVSMSGTSQSAAHAAGIAAVLLNAYPSASPAEVLQLLRYHAVQRVINPDSLPPEHYLTTPDMVAALPTSAATGEKLLCRSVWSKRSGVGSFDTAVARCRHGEEMFSCSSYSPNGVHAGERIEIRDGQKVCEAHHGIGGQGVYAVARCCTGSRVKCHASASLHVGIDAECPSQEFQLTGCSSHYIRSQDVAQPSWPLHSNRKACPAGEGGTSHAFCCHAPNLECHLIEHHQSEFTKQVEVSCEDSWTLTGCNAVSHGSVTHAAYTRGNTCVIQMFGGDKGAAAIAICCRYRPLDQQSNNNHEQNT

SEQ ID NO: 76 - protein, 659 aa, Artificial Sequence
  synthetic
MHLVLVLCLAALAACDYSEDKEVKAPQLDHPDPGTERVAELLRCTKSVWRIPEQYLVVLREGTRDSHVQRTVSTLRAQAARRGHAIHIMHTYSGVFHGFLIKMSSEVLPMALKLPHVAYIEEDSSIFAQSIPWNLQRIIQTKHETGKYTPPNDGAQVTVFLLDTSVQTDHREIEGKVMVTDFNSMPKEDGTRFHRSASKCESHGTHIAGVLSGRDAGVARGVSVNTVRVLNCQGRGTVSGALAGLEYIRASLQAQPVSPVIILLPFVGGFSRTLNTACREMVHSGAVLIAAAGNYQDDACMYSPASEPEVITVEASNAADRPLSSGTTGTNLGRCVDVFAPGEDIISASGDCSTCFVSMSGTSQSAAHAAGIAAVLLNAYPSASPAEVLQLLRYHAVQRVINPDSLPPEHYLTTPDMVAALPTSAATGEKLLCRSVWSKRSGVGSFDTAVARCRHGEEMFSCSSYSPNGVHAGERIEIRDGQKVCEAHHGIGGQGVYAVARCCTGSRVKCHASASLHVGIDAECPSQEFQLTGCSSHYIRSQDVAQPSWPLHSNRKACPAGEGGTSHAFCCHAPNLECHLIEHHQSEFTKQVEVSCEDSWTLTGCNAVSHGSVTHAAYTRGNTCVIQMFGGDKGAAAIAICCRYRPLDQQSNNNHEQNT

SEQ ID NO: 77 - protein, 659 aa, Artificial Sequence
  synthetic
MHLVLVLCLAALAACDYSEDKEVKAPQLDHPDPGTERVAELLRCTKSVWRIPEQYLVVLREGTRDSHVQRTVSTLRAQAARRGHAIHIMHTYSGVFHGFLIKMSSEVLPMALKLPHVAYIEEDSSIFAQSIPWNLQRIIQTKHETGKYTPPNDGAQVTVFLLDTSVQTDHREIEGKVMVTDFNSMPKEDGTRFHRSASKCESHGTHIAGVLSGRDAGVARGVSVNTVRVLNCQGRGTVSGALAGLEYIRASLQAQPVSPVIILLPFVGGFSRTLNTACREMVHSGAVLIAAAGNYQDDACMYSPASEPEVIAVGASNAADRPLSSGTTGTNLGRCVDVFAPGEDIISASGDCSTCFVSMSGTSQSAAHAAGIAAVLLNAYPSASPAEVLQLLRYHAVQRVINPDSLPPEHYLTTPDMVAALPTSAATGEKLLCRSVWSKRSGVGSFDTAVARCRHGEEMFSCSSYSPNGVHAGERIEIRDGQKVCEAHHGIGGQGVYAVARCCTGSRVKCHASASLHVGIDAECPSQEFQLTGCSSHYIRSQDVAQPSWPLHSNRKACPAGEGGTSHAFCCHAPNLECHLIEHHQSEFTKQVEVSCEDSWTLTGCNAVSHGSVTHAAYTRGNTCVIQMFGGDKGAAAIAICCRYRPLDQQSNNNHEQNT

SEQ ID NO: 78 - protein, 659 aa, Artificial Sequence
  synthetic
MHLVLVLCLAALAACDYSEDKEVKAPQLDHPDPGTERVAELLRCTKSVWRIPEQYLVVLREGTRDSHVQRTVSTLRAQAARRGHAIHIMHTYSGVFHGFLIKMSSEVLPMALKLPHVAYIEEDSSIFAQSIPWNLQRIIQTKHETGKYTPPNDGAQVTVFLLDTSVQTDHREIEGKVMVTDFNSMPKEDGTRFHRSASKCESHGTHIAGVLSGRDAGVARGVSVNTVRVLNCQGRGTVSGALAGLEYIRASLQAQPVSPVIILLPFVGGFSRTLNTACREMVHSGAVLIAAAGNYQDDACMYSPASESEVITVGASNAADRPLSSGTTGTNLGRCVDVFAPGEDIISASGDCSTCFVSMSGTSQSAAHAAGIAAVLLNAYPSASPAEVLQLLRYHAVQRVINPDSLPPEHYLTTPDMVAALPTSAATGEKLLCRSVWSKRSGVGSFDTAVARCRHGEEMFSCSSYSPNGVHAGERIEIRDGQKVCEAHHGIGGQGVYAVARCCTGSRVKCHASASLHVGIDAECPSQEFQLTGCSSHYIRSQDVAQPSWPLHSNRKACPAGEGGTSHAFCCHAPNLECHLIEHHQSEFTKQVEVSCEDSWTLTGCNAVSHGSVTHAAYTRGNTCVIQMFGGDKGAAAIAICCRYRPLDQQSNNNHEQNT

SEQ ID NO: 79 - protein, 659 aa, Artificial Sequence
  synthetic
MHLVLVLCLAALAACDYSEDKEVKAPQLDHPDPGTERVAELLRCTKSVWRIPEQYLVVLREGTRDSHVQRTVSTLRAQAARRGHAIHIMHTYSGVFHGFLIKMSSEVLPMALKLPHVAYIEEDSSIFAQSIPWNLQRIIQTKHETGKYTPPNDGAQVTVFLLDTSVQTDHREIEGKVMVTDFNSMPKEDGTRFHRSASKCESHGTHIAGVLSGRDAGVARGVSVNTVRVLNCQGRGTVSGALAGLEYIRASLQAQPVSPVIILLPFVGGFSRTLNTACREMVHSGAVLIAAAGNYQDDACMYSPASEPEVITVGASNAADRPLSSGTTGTNLGRCVDVFAPGDDIISASGDCSTCFVSMSGTSQSAAHAAGIAAVLLNAYPSASPAEVLQLLRYHAVQRVINPDSLPPEHYLTTPDMVAALPTSAATGEKLLCRSVWSKRSGVGSFDTAVARCRHGEEMFSCSSYSPNGVHAGERIEIRDGQKVCEAHHGIGGQGVYAVARCCTGSRVKCHASASLHVGIDAECPSQEFQLTGCSSHYIRSQDVAQPSWPLHSNRKACPAGEGGTSHAFCCHAPNLECHLIEHHQSEFTKQVEVSCEDSWTLTGCNAVSHGSVTHAAYTRGNTCVIQMFGGDKGAAAIAICCRYRPLDQQSNNNHEQNT

SEQ ID NO: 80 - protein, 659 aa, Artificial Sequence
  synthetic
MHLVLVLCLAALAACDYSEDKEVKAPQLDHPDPGTERVAELLRCTKSVWRIPEQYLVVLREGTRDSHVQRTVSTLRAQAARRGHAIHIMHTYSGVFHGFLIKMSSEVLPMALKLPHVAYIEEDSSIFAQSIPWNLQRIIQTKHETGKYTPPNDGAQVTVFLLDTSVQTDHREIEGKVMVTDFNSMPKEDGTRFHRSASKCESHGTHIAGVLSGRDAGVARGVSVNTVRVLNCQGRGTVSGALAGLEYIRASLQAQPVSPVIILLPFVGGFSRTLNTACREMVHSGAVLIAAAGNYQDDACMYSPASEPEVITVGASNAADRPLSSGTTGTNLGRCVDVFAPGEDIVSASGDCSTCFVSMSGTSQSAAHAAGIAAVLLNAYPSASPAEVLQLLRYHAVQRVINPDSLPPEHYLTTPDMVAALPTSAATGEKLLCRSVWSKRSGVGSFDTAVARCRHGEEMFSCSSYSPNGVHAGERIEIRDGQKVCEAHHGIGGQGVYAVARCCTGSRVKCHASASLHVGIDAECPSQEFQLTGCSSHYIRSQDVAQPSWPLHSNRKACPAGEGGTSHAFCCHAPNLECHLIEHHQSEFTKQVEVSCEDSWTLTGCNAVSHGSVTHAAYTRGNTCVIQMFGGDKGAAAIAICCRYRPLDQQSNNNHEQNT

SEQ ID NO: 81 - protein, 659 aa, Artificial Sequence
  synthetic
MHLVLVLCLAALAACDYSEDKEVKAPQLDHPDPGTERVAELLRCTKSVWRIPEQYLVVLREGTRDSHVQRTVSTLRAQAARRGHAIHIMHTYSGVFHGFLIKMSSEVLPMALKLPHVAYIEEDSSIFAQSIPWNLQRIIQTKHETGKYTPPNDGAQVTVFLLDTSVQTDHREIEGKVMVTDFNSMPKEDGTRFHRSASKCESHGTHIAGVLSGRDAGVARGVSVNTVRVLNCQGRGTVSGALAGLEYIRASLQAQPVSPVIILLPFVGGFSRTLNTACREMVHSGAVLIAAAGNYQDDACMYSPASEPEVITVGASNAADRPLSSGTTGTNLGRCVDVFAPGDDIVSASGDCSTCFVSMSGTSQSAAHAAGIAAVLLNAYPSASPAEVLQLLRYHAVQRVINPDSLPPEHYLTTPDMVAALPTSAATGEKLLCRSVWSKRSGVGSFDTAVARCRHGEEMFSCSSYSPNGVHAGERIEIRDGQKVCEAHHGIGGQGVYAVARCCTGSRVKCHASASLHVGIDAECPSQEFQLTGCSSHYIRSQDVAQPSWPLHSNRKACPAGEGGTSHAFCCHAPNLECHLIEHHQSEFTKQVEVSCEDSWTLTGCNAVSHGSVTHAAYTRGNTCVIQMFGGDKGAAAIAICCRYRPLDQQSNNNHEQNT

SEQ ID NO: 82 - protein, 659 aa, Artificial Sequence
  synthetic
MHLVLVLCLAALAACDYSEDKEVKAPQLDHPDPGTERVAELLRCTKSVWRIPEQYLVVLREGTRDSHVQRTVSTLRAQAARRGHAIHIMHTYSGVFHGFLIKMSSEVLPMALKLPHVAYIEEDSSIFAQSIPWNLQRIIQTKHETGKYTPPNDGAQVTVFLLDTSVQTDHREIEGKVMVTDFNSMPKEDGTRFHRSASKCESHGTHIAGVLSGRDAGVARGVSVNTVRVLNCQGRGTVSGALAGLEYIRASLQAQPVSPVIILLPFVGGFSRTLNTACREMVHSGAVLIAAAGNYQDDACMYSPASEPEVITVGASNAADRPLSSGTTGTNLGRCVDVFAPGNDIVSASGDCSTCFVSMSGTSQSAAHAAGIAAVLLNAYPSASPAEVLQLLRYHAVQRVINPDSLPPEHYLTTPDMVAALPTSAATGEKLLCRSVWSKRSGVGSFDTAVARCRHGEEMFSCSSYSPNGVHAGERIEIRDGQKVCEAHHGIGGQGVYAVARCCTGSRVKCHASASLHVGIDAECPSQEFQLTGCSSHYIRSQDVAQPSWPLHSNRKACPAGEGGTSHAFCCHAPNLECHLIEHHQSEFTKQVEVSCEDSWTLTGCNAVSHGSVTHAAYTRGNTCVIQMFGGDKGAAAIAICCRYRPLDQQSNNNHEQNT

SEQ ID NO: 83 - protein, 659 aa, Artificial Sequence
  synthetic
MHLVLVLCLAALAACDYSEDKEVKAPQLDHPDPGTERVAELLRCTKSVWRIPEQYLVVLREGTRDSHVQRTVSTLRAQAARRGHAIHIMHTYSGVFHGFLIKMSSEVLPMALKLPHVAYIEEDSSIFAQSIPWNLQRIIQTKHETGKYTPPNDGAQVTVFLLDTSVQTDHREIEGKVMVTDFNSMPKEDGTRFHRSASKCESHGTHIAGVLSGRDAGVARGVSVNTVRVLNCQGRGTVSGALAGLEYIRASLQAQPVSPVIILLPFVGGFSRTLNTACREMVHSGAVLIAAAGNYQDDACMYSPASEPEVITVGASNAADRPLSSGTTGTNLGRCVDVFAPGDNIVSASGDCSTCFVSMSGTSQSAAHAAGIAAVLLNAYPSASPAEVLQLLRYHAVQRVINPDSLPPEHYLTTPDMVAALPTSAATGEKLLCRSVWSKRSGVGSFDTAVARCRHGEEMFSCSSYSPNGVHAGERIEIRDGQKVCEAHHGIGGQGVYAVARCCTGSRVKCHASASLHVGIDAECPSQEFQLTGCSSHYIRSQDVAQPSWPLHSNRKACPAGEGGTSHAFCCHAPNLECHLIEHHQSEFTKQVEVSCEDSWTLTGCNAVSHGSVTHAAYTRGNTCVIQMFGGDKGAAAIAICCRYRPLDQQSNNNHEQNT

SEQ ID NO: 84 - protein, 659 aa, Artificial Sequence
  synthetic
MHLVLVLCLAALAACDYSEDKEVKAPQLDHPDPGTERVAELLRCTKSVWRIPEQYLVVLREGTRDSHVQRTVSTLRAQAARRGHAIHIMHTYSGVFHGFLIKMSSEVLPMALKLPHVAYIEEDSSIFAQSIPWNLQRIIQTKHETGKYTPPNDGAQVTVFLLDTSVQTDHREIEGKVMVTDFNSMPKEDGTRFHRSASKCESHGTHIAGVLSGRDAGVARGVSVNTVRVLNCQGRGTVSGALAGLEYIRASLQAQPVSPVIILLPFVGGFSRTLNTACREMVHSGAVLIAAAGNYQDDACMYSPASEPEVITIGASNAADRPLSSGTTGTNLGRCVDVFAPGEDIISASGDCSTCFVSMSGTSQSAAHAAGIAAVLLNAYPSASPAEVLQLLRYHAVQRVINPDSLPPEHYLTTPDMVAALPTSAATGEKLLCRSVWSKRSGVGSFDTAVARCRHGEEMFSCSSYSPNGVHAGERIEIRDGQKVCEAHHGIGGQGVYAVARCCTGSRVKCHASASLHVGIDAECPSQEFQLTGCSSHYIRSQDVAQPSWPLHSNRKACPAGEGGTSHAFCCHAPNLECHLIEHHQSEFTKQVEVSCEDSWTLTGCNAVSHGSVTHAAYTRGNTCVIQMFGGDKGAAAIAICCRYRPLDQQSNNNHEQNT

SEQ ID NO: 85 - protein, 683 aa, Artificial Sequence
  synthetic
MHLVLVLCLAALAACDYSEDKEVKAPQLDHPKPGTERVAELLRCTKSVWRIPEQYLVVLREGTRDSHVQRTVSTLRAQAARRGHAIHIMHTYSGVFHGFLIKMSSEVLPMALKLPHVAYIEEDSSIFAQSIPWNLQRIIQTKHETGKYTPPNDGAQVTVFLLDTSVQTDHREIEGKVMVTDFNSMPKEDGTRFHQSASKCESHGTHIAGVLSGRDSGVARGVSVNTVRVLNCQGRGTVSGALAGLEYIRASLQAQPVSPVIILLPFVGGFSRTLNTACREMVHSGAVLIAAAGNYQDDACMYSPASEPEVITIGASNAADRPLSSGTTGTNLGRCVDVFAPGEDIVSASGDCSTCFTSMSGTSQSAAHAAGIAAVLLNAYPSASPAEVLQLLRYHAVQRVINPDSLPPEHYLTTPDMVAALPTSAATGEKLLCRSVWSKRSGVGSFDTAVARCRHGEEMFSCSSYSPNGVHAGERIEIRDGQKVCEAHHGIGGQGVYAVARCCTGSRVKCHASASLHVGIDAECPSQEFQLTGCSSHYIRSQDVAQPSWPLHSNRKACPAGEGGTSHAFCCHAPNLECHLIEHHQSEFTKQVEVSCEDSWTLTGCNAVSHGSVTHAAYTRGNTCVIQMFGGDKGAAAIAICCRYRPLDQQSNNNHEQNTGGLVPRGSHHHHHHSAWSHPQFEK

SEQ ID NO: 86 - protein, 692 aa, Homo sapiens
MGTVSSRRSWWPLPLLLLLLLLLGPAGARAQEDEDGDYEELVLALRSEEDGLAEAPEHGTTATFHRCAKDPWRLPGTYVVVLKEETHLSQSERTARRLQAQAARRGYLTKILHVFHGLLPGFLVKMSGDLLELALKLPHVDYIEEDSSVFAQSIPWNLERITPPRYRADEYQPPDGGSLVEVYLLDTSIQSDHREIEGRVMVTDFENVPEEDGTRFHRQASKCDSHGTHLAGVVSGRDAGVAKGASMRSLRVLNCQGKGTVSGTLIGLEFIRKSQLVQPVGPLVVLLPLAGGYSRVLNAACQRLARAGVVLVTAAGNFRDDACLYSPASAPEVITVGATNAQDQPVTLGTLGTNFGRCVDLFAPGEDIIGASSDCSTCFVSQSGTSQAAAHVAGIAAMMLSAEPELTLAELRQRLIHFSAKDVINEAWFPEDQRVLTPNLVAALPPSTHGAGWQLFCRTVWSAHSGPTRMATAVARCAPDEELLSCSSFSRSGKRRGERMEAQGGKLVCRAHNAFGGEGVYAIARCCLLPQANCSVHTAPPAEASMGTRVHCHQQGHVLTGCSSHWEVEDLGTHKPPVLRPRGQPNQCVGHREASIHASCCHAPGLECKVKEHGIPAPQEQVTVACEEGWTLTGCSALPGTSHVLGAYAVDNTCVVRSRDVSTTGSTSEGAVTAVAICCRSRHLAQASQELQ

SEQ ID NO: 87 - protein, 686 aa, Artificial Sequence
  synthetic
MHLVLVLCLAALAACDYSEDKEVKAPQLDHPDPGTERVAELLRCTKSVWRIPEQYLVVLREGTRDSHVQRTVSTLRAQAARRGHAIHIMHTYSGVFHGFLIKMSSEVLPMALKLPHVAYIEEDSSIFAQSIPWNLQRIIQTKHETGKYTPPNDGAQVTVFLLDTSVQTDHREIEGKVMVTDFNSMPKEDGTRFHRSASKCESHGTHIAGVVSGRDAGVARGVSVNTVRVLNCQGRGTVSGALAGLEYIRASLQAQPVSPVIILLPFVGGFSRTLNTACREMVHSGAVLIAAAGNYQDDACMYSPASAPEVITVGASNAADRPLSSGTTGTNLGRCVDVFAPGEDIISASGDCSTCFVSMSGTSQSAAHAAGIAAVLLNAYPSASPAEVLQLLRYHAVQRVINPDSLPPEHYLTTPDMVAALPTSAATGEKLLCRSVWSKRSGVGSFDTAVARCRHGEEMFSCSSYSPNGVHAGERIEIRDGQKVCEAHHGIGGQGVYAVARCCTGSRVKCHASASLHVGIDAECPSQEFQLTGCSSHYIRSQDVAQPSWPLHSNRKACPAGEGGTSHAFCCHAPNLECHLIEHHQSEFTKQVEVSCEDSWTLTGCNAVSHGSVTHAAYTRGNTCVIQMFGGDKGAAAIAICCRYRPLDQQSNNNHEQNTGGLEVLFQGPGHHHHHHSAWSHPQFEK

SEQ ID NO: 88 - protein, 686 aa, Artificial Sequence
  synthetic
MHLVLVLCLAALAACDYSEDKEVKAPQLDHPDPGTERVAELLRCTKSVWRIPEQYLVVLREGTRDSHVQRTVSTLRAQAARRGHAIHIMHTYSGVFHGFLIKMSSEVLPMALKLPHVAYIEEDSSIFAQSIPWNLQRIIQTKHETGKYTPPNDGAQVTVFLLDTSVQTDHREIEGKVMVTDFNSMPKEDGTRFHRSASKCESHGTHIALDNTTGVAGVARGVSVNTVRVLNCQGRGTVSGALAGLEYIRASLQAQPVSPVIILLPFVGGFSRTLNTACREMVHSGAVLIAAAGNYQDDACMYSPASEPEVITVGASNAADRPLSSGTTGTNLGRCVDVFAPGEDIISASGDCSTCFVSMSGTSQSAAHAAGIAAVLLNAYPSASPAEVLQLLRYHAVQRVINPDSLPPEHYLTTPDMVAALPTSAATGEKLLCRSVWSKRSGVGSFDTAVARCRHGEEMFSCSSYSPNGVHAGERIEIRDGQKVCEAHHGIGGQGVYAVARCCTGSRVKCHASASLHVGIDAECPSQEFQLTGCSSHYIRSQDVAQPSWPLHSNRKACPAGEGGTSHAFCCHAPNLECHLIEHHQSEFTKQVEVSCEDSWTLTGCNAVSHGSVTHAAYTRGNTCVIQMFGGDKGAAAIAICCRYRPLDQQSNNNHEQNTGGLEVLFQGPGHHHHHHSAWSHPQFEK

SEQ ID NO: 89 - protein, 686 aa, Artificial Sequence
  synthetic
MHLVLVLCLAALAACDYSEDKEVKAPQLDHPDPGTERVAELLRCTKSVWRIPEQYLVVLREGTRDSHVQRTVSTLRAQAARRGHAIHIMHTYSGVFHGFLIKMSSEVLPMALKLPHVAYIEEDSSIFAQSIPWNLQRIIQTKHETGKYTPPNDGAQVTVFLLDTSVQTDHREIEGKVMVTDFNSMPKEDGTRFHRSASKCESHGTHIALDNTTGVAGVARGVSVNTVRVLNCQGRGTVSGALAGLEYIRASLQAQPVSPVIILLPFVGGFSRTLNTACREMVHSGAVLIAAAGNYQDDACMYSPASPAKYDSVIASNAADRPLSSGTTGTNLGRCVDVFAPGEDIISASGDCSTCFVSMSGTSQSAAHAAGIAAVLLNAYPSASPAEVLQLLRYHAVQRVINPDSLPPEHYLTTPDMVAALPTSAATGEKLLCRSVWSKRSGVGSFDTAVARCRHGEEMFSCSSYSPNGVHAGERIEIRDGQKVCEAHHGIGGQGVYAVARCCTGSRVKCHASASLHVGIDAECPSQEFQLTGCSSHYIRSQDVAQPSWPLHSNRKACPAGEGGTSHAFCCHAPNLECHLIEHHQSEFTKQVEVSCEDSWTLTGCNAVSHGSVTHAAYTRGNTCVIQMFGGDKGAAAIAICCRYRPLDQQSNNNHEQNTGGLEVLFQGPGHHHHHHSAWSHPQFEK

SEQ ID NO: 90 - protein, 705 aa, Artificial Sequence
  synthetic
MHLVLVLCLAALAACDYSEDKEVKAPQLDHPDPGTERVAELLRCTKSVWRIPEQYLVVLREGTRDSHVQRTVSTLRAQAARRGHAIHIMHTYSGVFHGFLIKMSSEVLPMALKLPHVAYIEEDSSIFAQSITVFTSWEEYLDWVGSGIPIPWNLQRIIQTKHETGKYTPPNDGAQVTVFLLDTSVQTDHREIEGKVMVTDFNSMPKEDGTRFHRSASKCESHGTHIAGVLSGRDAGVARGVSVNTVRVLNCQGRGTVSGALAGLEYIRASLQAQPVSPVIILLPFVGGFSRTLNTACREMVHSGAVLIAAAGNYQDDACMYSPASEPEVITVGASNAADRPLSSGTTGTNLGRCVDVFAPGEDIISASGDCSTCFVSMSGTSQSAAHAAGIAAVLLNAYPSASPAEVLQLLRYHAVQRVINPDSLPPEHYLTTPDMVAALPTSAATGEKLLCRSVWSKRSGVGSFDTAVARCRHGEEMFSCSSYSPNGVHAGERIEIRDGQKVCEAHHGIGGQGVYAVARCCTGSRVKCHASASLHVGIDAECPSQEFQLTGCSSHYIRSQDVAQPSWPLHSNRKACPAGEGGTSHAFCCHAPNLECHLIEHHQSEFTKQVEVSCEDSWTLTGCNAVSHGSVTHAAYTRGNTCVIQMFGGDKGAAAIAICCRYRPLDQQSNNNHEQNTGGLEVLFQGPGHHHHHHSAWSHPQFEK

SEQ ID NO: 91 - protein, 695 aa, Artificial Sequence
  synthetic
MHLVLVLCLAALAACDYSEDKEVKAPQLDHPDPGTERVAELLRCTKSVWRIPEQYLVVLREGTRDSHVQRTVSTLRAQAARRGHAIHIMHTYSGVFHGFLIKMSSEVLPMALKLPHVAYIEEDSSIFAQSITVFTSWEEYLDWVGSGDLMPWNLVRIGLLRDGAQVTVFLLDTSVQTDHREIEGKVMVTDFNSMPKEDGTRFHRSASKCESHGTHIAGVLSGRDAGVARGVSVNTVRVLNCQGRGTVSGALAGLEYIRASLQAQPVSPVIILLPFVGGFSRTLNTACREMVHSGAVLIAAAGNYQDDACMYSPASEPEVITVGASNAADRPLSSGTTGTNLGRCVDVFAPGEDIISASGDCSTCFVSMSGTSQSAAHAAGIAAVLLNAYPSASPAEVLQLLRYHAVQRVINPDSLPPEHYLTTPDMVAALPTSAATGEKLLCRSVWSKRSGVGSFDTAVARCRHGEEMFSCSSYSPNGVHAGERIEIRDGQKVCEAHHGIGGQGVYAVARCCTGSRVKCHASASLHVGIDAECPSQEFQLTGCSSHYIRSQDVAQPSWPLHSNRKACPAGEGGTSHAFCCHAPNLECHLIEHHQSEFTKQVEVSCEDSWTLTGCNAVSHGSVTHAAYTRGNTCVIQMFGGDKGAAAIAICCRYRPLDQQSNNNHEQNTGGLEVLFQGPGHHHHHHSAWSHPQFEK

SEQ ID NO: 92 - protein, 1149 aa, Artificial Sequence
  synthetic
MHLVLVLCLAALAACDYSEDKEVKAPQLDHPDPGTERVAELLRCTKSVWRIPEQYLVVLREGTRDSHVQRTVSTLRAQAARRGHAIHIMHTYSGVFHGFLIKMSSEVLPMALKLPHVAYIEEDSSIFAQSIPWNLQRIIQTKHETGKYTPPNDGAQVTVFLLDTSVQTDHREIEGKVMVTDFNSMPKEDGTRFHRSASKCESHGTHIAGVLSGRDAGVARGVSVNTVRVLNCQGRGTVSGALAGLEYIRASLQAQPVSPVIILLPFVGGFSRTLNTACREMVHSGAVLIAAAGNYQDDACMYSPASEPEVITVGASNAADRPLSSGTTGTNLGRCVDVFAPGEDIISASGDCSTCFVSMSGTSQSAAHAAGIAAVLLNAYPSASPAEVLQLLRYHAVQRVINPDSLPPEHYLTTPDMVAALPTSAATGEKLLCRSVWSKRSGVGSFDTAVARCRHGEEMFSCSSYSPNGVHAGERIEIRDGQKVCEAHHGIGGQGVYAVARCCTGSRVKCHASASLHVGIDAECPSQEFQLTGCSSHYIRSQDVAQPSWPLHSNRKACPAGEGGTSHAFCCHAPNLECHLIEHHQSEFTKQVEVSCEDSWTLTGCNAVSHGSVTHAAYTRGNTCVIQMFGGDKGAAAIAICCRYRPLDQQSNNNHEQNTGGGGSGGGGSMKNLDCWVDNEEDIDVILKKSTILNLDINNDIISDISGFNSSVITYPDAQLVPGINGKAIHLVNNESSEVIVHKAMDIEYNDMFNNFTVSFWLRVPKVSASHLEQYGTNEYSIISSMKKHSLSIGSGWSVSLKGNNLIWTLKDSAGEVRQITFRDLPDKFNAYLANKWVFITITNDRLSSANLYINGVLMGSAEITGLGAIREDNNITLKLDRCNNNNQYVSIDKFRIFCKALNPKEIEKLYTSYLSITFLRDFWGNPLRYDTEYYLIPVASSSKDVQLKNITDYMYLTNAPSYTNGKLNIYYRRLYNGLKFIIKRYTPNNEIDSFVKSGDFIKLYVSYNNNEHIVGYPKDGNAFNNLDRILRVGYNAPGIPLYKKMEAVKLRDLKTYSVQLKLYDDKNASLGLVGTHNGQIGNDPNRDILIASNWYFNHLKDKILGCDWYFVPTDEGWTNDGSGLEVLFQGPGHHHHHHSAWSHPQFEK

SEQ ID NO: 93 - protein, 659 aa, Artificial Sequence
  synthetic
MHLVLVLCLAALAACDYSEDKEVKAPQLDHPDPGTERVAELLRCTKSVWRIPEQYLVVLREGTRDSHVQRTVSTLRAQAARRGHAIHIMHTYSGVFHGFLIKMSSEVLPMALKLPHVAYIEEDSSIFAQSIPWNLQRIIQTKHETGKYTPPNDGAQVTVFLLDTSVQTDHREIEGKVMVTDFNSMPKEDGTRFHRSASKCESHGTHIAGVLSGRDAGVRKGVSVNTVRVLNCQGRGTVSGALAGLEYIRASLQAQPVSPVIILLPFVGGFSRTLNTACREMVHSGAVLIAAAGNFQDDACMYSPASEPEVITVGASNAQDRPLTLGTLGTNLGRCVDVFAPGEDIISASGDCSTCFVSMSGTSQSAAHAAGIAAVLLNAYPSASPAEVLQLLRYHAVQRVINPDSLPPEHYLTTPDMVAALPTSAATGEKLLCRSVWSKRSGVGSFDTAVARCRHGEEMFSCSSYSPNGVHAGERIEIRDGQKVCEAHHGIGGQGVYAIARCCTGSRVKCHASASLHVGIDAECPSQEFQLTGCSSHYIRSQDVAQPSWPLHSNRKACPAGEGGTSHAFCCHAPNLECHLIEHHQSEFTKQVEVSCEDSWTLTGCNAVSHGSVTHAAYTRGNTCVIQMFGGDKGAAAIAICCRYRPLDQQSNNNHEQNT

SEQ ID NO: 94 - protein, 667 aa, Artificial Sequence
  synthetic
MIASKKTTDFWKMSFFLVMCLAALAACDNPEEKPVNAPVIVHPPPPRTERVAEFLRCTKSAWCIPDQYLVVLQEGAHDSHVQRTVSTLRAQAARSRHTIHITHTYSGAFCGFLIKMSSEVLPMALKLPHVAYIEEDSSIFAQSIPWNLQRIMQTKHETGKYTPPNDGAQVTVFLLDTSIQTDHREIEGKVMVTDFNSVPKEDGTRFHRSASKCESHGTHIAGVLSGRDAGVARGVGVNTVRVLNCQGRGTVSGALAGLEYIRASLQAQPVRPVIILLPFVGGFSRTLNIACQEMVHSGAVLIAAAGNYQDDACMYSPASEPEVITIGATNAADQLLSSGTTGTNLGRCVDVFAPGEDIISASGDCSTCFVSKRGTSQAAAHAAGIAAVLLNAHPSASPAEVLQLLRYHSVQHVINPDSLPPEHYHTTPDMVAALPKSAATGETLLCRSVWSKRSGVGSFDTAVAHCRRGEEMFSCSSYSPNGVHAGEKIEIRDGQKVCESHHAIGGHGVYAIARCCTGSRVKCHASASLHVGVDAECPSQEYQLTGCSSHYIRSHDTAQPSRLLHSNRKACPAGEGGTSHASCCRAPNLECHLIEFTRQVEVSCEDSWTLTWCIAASHGSVTHGAYTRGNTCVIQMFGEHKGTAALAICCRFRPLDQQSNKNHEQNT

SEQ ID NO: 95 - protein, 661 aa, Artificial Sequence
  synthetic
MRRTSAWVGWVLCLCTSLAASAQDYPDGDEMILDMFSEDGTKPEPRAVPTAEFLKCNKAAWRVHGQYLVVLRQGTHGSHVQRTIRRLRAKAARRGQLLEILHTYSAALHGFMVKMSSDVLHLALKLPQVHYIEEDSSIFAQSIPWNLQRLLQPHGGSSENGTYRPPNDGGMALVYLLDGSVQSDHREVEGRVLITDFNSVPKEDGTRFHRSASKCESHGTHIAGVVTGRDAGVARGAGVNLVRILNCQGKGSVSGALAGLEYIQSTLLARPVDAVVVLLPFSGGFSRSLNAACRDMVAKGAVVIAAAGNYRDDACFYSPASEPEVITVGAVNSVDQLMSQGAGGTNFGRCIDVFAPGEDIISASGDCSTCFVSRSGTSQSAAHAAGIAAVILSSNQNVSPVQVMQMMLHYSSSHTINFLSLPDSHRLISPNLVAAMPPANSAKELLCRSVWSKRSGVTSSDQAVSRCRLGEEMMSCSSYTLDGVHAGETISESSGQMECVAFNALGGEGVYAVARCCVIGGLQCQVHASPECVATQHHLTGCTLRSAAGISADSRPHGSDRRRCVGSSGATSHAVCCHAPSLECRLMEKISADKDQVELSCPSGWTLTDCSAVSPGSVILAPVAKGNSCHVGSASGAGGAAGVVVCCRVRQPEQRRASPPP

SEQ ID NO: 96 - protein, 659 aa, Artificial Sequence
  synthetic
MRRTSAWVGWVLCLCTSLAASAQDYPDGDEMILDMFSEDGTKPEPRAVPTAEFLKCNKAAWRVHGQYLVVLRQGTHGSHVQRTIRRLRAKAARRGQLLEILHTYSAALHGFMVKMSSDVLHLALKLPQVHYIEEDSSIFAQSIPWNLQRLLQPHGGSSESGTYRPPNDGGMALVYLLDGSVQSDHREVEGRVLITDFNSVPKEDGTRFHRSASKCESHGTHIAGVVTGRDAGVARGAGVNLVRILNCQGKGSVSGALAGLEYIQSTLLARPVDAVVVLLPFSGGFSRSLNAACRDMVAKGAVVIAAAGNYRDDACFYSPASEPEVITVGAVNSVDQLMSQGAGGTNFGRCIDVFAPGEDIISASGDCSTCFVSRSGTSQSAAHAAGIAAVILSSNQQVSPVQVMQMMLHYSSSHTINFLSLPDSHRLISPNLVAAMPPANSAKELLCRSVWSKRSGVTSSDQAVSRCRLGEEMMSCSSYTLDGVHAGETISESSGQMECVAFNALGGEGVYAVARCCVIGGLQCQVHASPECVATQHHLTGCTLRSAAGISADSRPHGSDRRRCVGSSGATSHAVCCHAPSLECRLMEKISADKDQVELSCPSGWTLTDCSAVSPGSVILAPVAKGNSCHVGSASGAGGAAGVVVCCRVRQPEQRRASP

SEQ ID NO: 97 - protein, 670 aa, Artificial Sequence
  synthetic
MRRTSAWVGWALCLCASLAANAQDYPEDDEMILDLIREDGTQPETGTEPAAEFLRCNKAAWRMPGKYLVILRQGTHGSHVQRTIRRLRAKAARRSYLLEILQTYSGALKGFLVKMSSDVLHLAVKLPHVHYIEEDSSIFAQSIPWNLQRLLQPRGGTSENGTYQPPNDGAMAEVYLMDGSVQTDHREIEGKVLITDFNDVPKEDGTRFHRSASKCESHGTHMAGVVTGRDAGVARGADVNLVRILNCQGKGSVSGALAGLEYIRATLLARPVEAVVVLLPFIGGFSRSLNTACRDMVANGAVVIAAAGNYRDDACMYSPASEPEVITVGAVNSADQLMSQGAGGTNVGRCVDFFAPGEDIISASGDCSTCFVSRSGTSQSAAHAAGIAAVILSSSQNMSPVHVLQTMLHHSISNTINLLSLSETHYLTTPNLVAAMPPTNRTNADGELLCRSVWSEKSGVASADRAVSRCRLGEEMLGCSSYTPDGVRVGESIAINGERMECVAYNGPGGKGVYAVARCCAIGGLRCQVHASPKPGQDAECIDPQHHLTGCTSWSTTKTLSDSRPHHGDRRRCIVKNGVASHAVCCHAPALQCLLMENTSADKEQVEVSCPSGWTLTDCSAVSQDSSILGPVAKGNSCRVHGATTGAGGAAGIAVCCRVRPPEQPAAAPH

SEQ ID NO: 98 - protein, 667 aa, Artificial Sequence
  synthetic
MRRTSAWVGWALCLCASLAANAQDYPEDDEMILDLIREDGTQPETGTEPAAEFLRCNKAAWRMPGKYLVILRQGTHGSHVQRTIRRLRAKAARRSYLLEILQTYSGALKGFLVKMSSDVLHLAVKLPHVHYIEEDSSIFAQSIPWNLQRLLQPRGGTSESGTYQPPNDGAMAEVYLMDGSVQTDHREIEGKVLITDFNDVPKEDGTRFHRSASKCESHGTHMAGVVTGRDAGVARGADVNLVRILNCQGKGSVSGALAGLEYIRATLLARPVEAVVVLLPFIGGFSRSLNTACRDMVANGAVVIAAAGNYRDDACMYSPASEPEVITVGAVNSADQLMSQGAGGTNVGRCVDFFAPGEDIISASGDCSTCFVSRSGTSQSAAHAAGIAAVILSSSQQMSPVHVLQTMLHHSISNTINLLSLSETHYLTTPNLVAAMPPTQRTNADGELLCRSVWSEKSGVASADRAVSRCRLGEEMLGCSSYTPDGVRVGESIAINGERMECVAYNGPGGKGVYAVARCCAIGGLRCQVHASPKPGQDAECIDPQHHLTGCTSWSTTKTLSDSRPHHGDRRRCIVKNGVASHAVCCHAPALQCLLMETSADKEQVEVSCPSGWTLTDCSAVSQDSSILGPVAKGNSCRVHGATTGAGGAAGIAVCCRVRPPEQPAAA

SEQ ID NO: 99 - protein, 667 aa, Artificial Sequence
  synthetic
MRKMCPISGWIGCALCLCASLVVCAQDHTEEDDMILEMILDDGLQAEAGDAPSAQFLKCNKAAWRIPGQYVVVLHRGTHESQVQRTIRRLRARAARGGFPLEILHTYSGVLQGFLVKMSHDALNLAVKLPHVHYIEEDSSIFAQSIPWNLQRLLRPHAGISVSGTYLPPNDGGMAEVYLMDGSVQQDHREIEGKVLITDFNSVPKEDGTRFHRSASKCESHGTHVAGVVTGRDAGVARGAGVNLVRILNCQGKGSVSGALSGLEYIRATLLARPVDAAVVLLPFIGGFSRSLNTACRQLVAHGAVVIAAAGNYREDACMYSPASEPEVITVGAVNSADHLMSQGAGGSNFGPCVDVFAPGEDIISASGDCSTCFVSRSGTSQSAAHAAGIAAVILSSNQKASPLQVLHTMLHYSISDTINFLPLSETHRLTTPNLVAAMPSADNPTPNGELVCRSVWSERSGLSGGDTAVSRCRVGEELMGCSSYAPDGTRVGETVTESRGRMECTAFNGPAGTGVYAVARCCAISGLRCQAHASPEPGQDAQCAGPQHHLTGCTTWSTAEILSDSRPHHGGRRGCLAKGRATSHAVCCHAPTLQCHLLEATPSDADQMSCPSGWTLTDCSAVSRDAAVVGSVPQGNGCRVHNAGRVEAAGVAVCCRVAPPDPPATT

SEQ ID NO: 100 - protein, 309 aa, Artificial Sequence
  synthetic
MLKKVLSCCIAATFGIYSASSLAQSSIPWGLDRIDQRNLPLDRNYNANFDGFGVTAYVIDTGVNNDHREIEGRSVSGYDGTRFHADASKCESHGTHVAGTIGGRDAGVAKNVNIVGVRVLSCSGSGTTSGVISGVDWVAQQASGPSVASMSLGGGQSTALDSAVQGAIQSGVSFMLAAGNSNADACQTSPARVPSGVTVGSTTSSDSRSSFSNWGSCVDVFAPGEDIISASYDCSTCFVSISGTSMATPHVAGVAALYLQENNGLTPLQLTGLLNSRASENKVSDTRGTTNKLLYSLADSGCEPDCGGP

SEQ ID NO: 101 - protein, 305 aa, Artificial Sequence
  synthetic
MLKKVLSCCIAATFGIYSASSLAATQTSIPWGLDRIDQRTLPLSGTFTYSNTGSGVNAYIIDTGIRVDHREIEGRATAVFDGTRFHQQASKCESHGTHVAGTVGGRDAGVAKSVRLYAVRVLSCSGSGSNSGVIAGVDWVRQNARRPAVASMSLGGGASSALDTAVNNAINAGITFALAAGNSNRDACQFSPARVTAGITVGATTSTDARASYSNYGSCLDVFAPGEDIISASIDCSTCFVSISGTSMATPHVAGVAALYLQSNPSASPATVRNAIVGQATSGVVSNAGRRSPNLLLYSNYENLY

SEQ ID NO: 102 - protein, 278 aa, Artificial Sequence
  synthetic
ADQPSIPWGIDRIDQRNLPLDNNYHTDYDGSGVTAFVIDTGVLNDHREIEGRASSGYDGTRFHYDASKCESHGTHVAGTIGGRDAGVAKNVNVVGVRVLNCSGSGSNSGVIAGINWVKNNASGPAVANMSLGGGASQATDDAVNAAVAAGITFVVAAGNDNSNACNYSPARAADAITVGSTTSNDSRSSFSNYGTCLDIYAPGEDIISASYDCSTCFVSISGTSMASPHVAGVAALYLDENPNLSPAQVTNLLKTRATADKVTDAKTGSPNKLLFSLA

SEQ ID NO: 103 - protein, 278 aa, Artificial Sequence
  synthetic
ADQPSIPWGIDRIDQRNLPLDNNYHTDYDGSGVTAFVIDTGVLNDHREIEGRASSGYDGTRFHYDASKCESHGTHVAGTIGGRDAGVAKNVNVVGVRVLNCQGSGSNSGVIAGINWVKNQASGPAVANMALGGGASQATDDAVNAAVAAGITFVVAAGNDNSNACQYSPARAADAITVGSTTSQDSRSSFSNYGTCLDIYAPGEDIISASYDCSTCFVSISGTSMASPHVAGVAALYLDENPQLSPAQVTNLLKTRATADKVTDAKTGSPNKLLFSLA

SEQ ID NO: 104 - protein, 286 aa, Artificial Sequence
  synthetic
QSSIPWGLDRIDQRNLPLDRNYNANFDGFGVTAYVIDTGVNNDHREIEGRSVSGYDGTRFHADASKCESHGTHVAGTIGGRDAGVAKNVNIVGVRVLSCSGSGTTSGVISGVDWVAQQASGPSVASMSLGGGQSTALDSAVQGAIQSGVSFMLAAGNSNADACQTSPARVPSGVTVGSTTSSDSRSSFSNWGSCVDVFAPGEDIISASYDCSTCFVSISGTSMATPHVAGVAALYLQENNGLTPLQLTGLLNSRASENKVSDTRGTTNKLLYSLADSGCEPDCGGP

SEQ ID NO: 105 - protein, 287 aa, Artificial Sequence
  synthetic
AYTQQPSIPWGLGRISHRSKGSTTYEYDTSGGSGTCAYVIDTGVEADHREIEGRASQIKDGTRFHQASKCESHGTHCAGTIGSRDAGVAKKTKIYGVKVLDNSGSGSYSGIISGMDFAVQDSKSRSCPKGVVASMSLGGGKAQSVNDGAAAMIRAGVFLAVAAGNDNANAAQYSPASEPTVCTVGATTSSDARSSFSNYGNLVDIFAPGEDIISASIDCSTCFVSISGTSMATPHIVGLGAYLAGLEGFPGAQALCKRIQTLSTKNVLTGIPSGTVNYLAFNGNPSG

SEQ ID NO: 106 - protein, 277 aa, Artificial Sequence
  synthetic
ATQSSIPWGLDRIDQRDLPLSNSYTYTATGRGVNVYVIDTGIRTDHREIEGRARVGYDGTRFHQASKCESHGTHVAGTIGGRDAGVAKAVNLYAVRVLDCSGSGSTSGVIAGVDWVTRNHRRPAVASMSLGGGVSTALDNAVKNSIAAGVVYAVAAGNDNANACQYSPARVAEALTVGATTSSDARASFSNYGSCVDVFAPGEDIISASYDCSTCFVSLSGTSMATPHVAGVAALYLEQNPSATPASVASAILNGATTGRLSGIGSGSPNRLLYSLL

SEQ ID NO: 107 - protein, 282 aa, Artificial Sequence
  synthetic
ATQTSIPWGLDRIDQRTLPLSGTFTYSNTGSGVNAYIIDTGIRVDHREIEGRATAVFDGTRFHQQASKCESHGTHVAGTVGGRDAGVAKSVRLYAVRVLSCSGSGSNSGVIAGVDWVRQNARRPAVASMSLGGGASSALDTAVNNAINAGITFALAAGNSNRDACQFSPARVTAGITVGATTSTDARASYSNYGSCLDVFAPGEDIISASIDCSTCFVSISGTSMATPHVAGVAALYLQSNPSASPATVRNAIVGQATSGVVSNAGRRSPNLLLYSNYENLY

SEQ ID NO: 108 - protein, 659 aa, Artificial Sequence
  synthetic
MHLVLVLCLAALAACDYSEDKEVKAPQLDHPDPGTERVAELLRCTKSVWRIPEQYLVVLREGTRDSHVQRTVSTLRAQAARRGHAIHIMHTYSGVFHGFLIKMSSEVLPMALKLPHVAYIEEDSSIFAQSIPWNLQRIIQTKHETGKYTPPNDGAQVTVFLLDTSVQTDHREIEGKVMVTDFNSMPKEDGTRFHRSASKCESHGTHIAGVLSGRDAGVARGVSVNTVRVLNCQGRGTVSGALAGLEYIRASLQAQPVSPVIILLPFVGGFSRTLNTACREMVHSGAVLIAAAGNYQDDACMYSPASEPEVITVGASNAADRPLSSGTTGTNLGRCVDVFAPGEDIISASGDCSTCFVSMSGTSQSAAHAAGIAAVLLNAYPSASPAEVLQLLRYHAVQRVINPDSLPPEHYLTTPDMVAALPTSAATGEKLLCRSVWSKRSGVGSFDTAVARCRHGEEMFSCSSYSPNGVHAGERIEIRDGQKVCEAHHGIGGQGVYAVARCCTGSRVKCHASASLCVGIDAECPSQEFQLTGCSSHYIRSQDVAQPSWPLHSNRKACPAGEGGTSHAFCCHAPNLECHLIEHHQSEFTKQVEVSCEDSWTLTGCNAVSHGSVTHAAYTRGNTCVIQMFGGDKGAAAIAICCRYRPLDQQSNNNHEQNT

SEQ ID NO: 109 - protein, 659 aa, Artificial Sequence
  synthetic
MHLVLVLCLAALAACDYSEDKEVKAPQLDHPDPGTERVAELLRCTKSVWRIPEQYLVVLREGTRDSHVQRTVSTLRAQAARRGHAIHIMHTYSGVFHGFLIKMSSEVLPMALKLPHVAYIEEDSSIFAQSIPWNLQRIIQTKHETGKYTPPNDGAQVTVFLLDTSVQTDHREIEGKVMVTDFNSMPKEDGTRFHRSASKCESHGTHIAGVLSGRDAGVARGVSVNTVRVLNCQGRGTVSGALAGLEYIRASLQAQPVSPVIILLPFVGGFSRTLNTACREMVHSGAVLIAAAGNYQDDACMYSPASEPEVITVGASNAADRPLSSGTTGTNLGRCVDVFAPGEDIISASGDCSTCFVSMSGTSQSAAHAAGIAAVLLNAYPSASPAEVLQLLRYHAVQRVINPDSLPPEHYLTTPDMVAALPTSAATGEKLLCRSVWSKRSGVGSFDTAVARCRHGEEMFSCSSYSPNGVHAGERIEIRDGQKVCEAHHGIGGQGVYAVARCCTGSRVKCHASASLHVGIDAECPSCEFQLTGCSSHYIRSQDVAQPSWPLHSNRKACPAGEGGTSHAFCCHAPNLECHLIEHHQSEFTKQVEVSCEDSWTLTGCNAVSHGSVTHAAYTRGNTCVIQMFGGDKGAAAIAICCRYRPLDQQSNNNHEQNT

SEQ ID NO: 110 - protein, 659 aa, Artificial Sequence
  synthetic
MHLVLVLCLAALAACDYSEDKEVKAPQLDHPDPGTERVAELLRCTKSVWRIPEQYLVVLREGTRDSHVQRTVSTLRAQAARRGHAIHIMHTYSGVFHGFLIKMSSEVLPMALKLPHVAYIEEDSSIFAQSIPWNLQRIIQTKHETGKYTPPNDGAQVTVFLLDTSVQTDHREIEGKVMVTDFNSMPKEDGTRFHRSASKCESHGTHIAGVLSGRDAGVARGVSVNTVRVLNCQGRGTVSGALAGLEYIRASLQAQPVSPVIILLPFVGGFSRTLNTACREMVHSGAVLIAAAGNYQDDACMYSPASEPEVITVGASNAADRPLSSGTTGTNLGRCVDVFAPGEDIISASGDCSTCFVSMSGTSQSAAHAAGIAAVLLNAYPSASPAEVLQLLRYHAVQRVINPDSLPPEHYLTTPDMVAALPTSAATGEKLLCRSVWSKRSGVGSFDTAVARCRHGEEMFSCSSYSPNGVHAGERIEIRDGQKVCEAHHGIGGQGVYAVARCCTGSRVKCHASASLHVGIDAECPSQEFQLTGCSSHYICSQDVAQPSWPLHSNRKACPAGEGGTSHAFCCHAPNLECHLIEHHQSEFTKQVEVSCEDSWTLTGCNAVSHGSVTHAAYTRGNTCVIQMFGGDKGAAAIAICCRYRPLDQQSNNNHEQNT

SEQ ID NO: 111 - protein, 659 aa, Artificial Sequence
  synthetic
MHLVLVLCLAALAACDYSEDKEVKAPQLDHPDPGTERVAELLRCTKSVWRIPEQYLVVLREGTRDSHVQRTVSTLRAQAARRGHAIHIMHTYSGVFHGFLIKMSSEVLPMALKLPHVAYIEEDSSIFAQSIPWNLQRIIQTKHETGKYTPPNDGAQVTVFLLDTSVQTDHREIEGKVMVTDFNSMPKEDGTRFHRSASKCESHGTHIAGVLSGRDAGVARGVSVNTVRVLNCQGRGTVSGALAGLEYIRASLQAQPVSPVIILLPFVGGFSRTLNTACREMVHSGAVLIAAAGNYQDDACMYSPASEPEVITVGASNAADRPLSSGTTGTNLGRCVDVFAPGEDIISASGDCSTCFVSMSGTSQSAAHAAGIAAVLLNAYPSASPAEVLQLLRYHAVQRVINPDSLPPEHYLTTPDMVAALPTSAATGEKLLCRSVWSKRSGVGSFDTAVARCRHGEEMFSCSSYSPNGVHAGERIEIRDGQKVCEAHHGIGGQGVYAVARCCTGSRVKCHASASLHVGIDAECPSQEFQLTGCSSHYIRSQDVAQPCWPLHSNRKACPAGEGGTSHAFCCHAPNLECHLIEHHQSEFTKQVEVSCEDSWTLTGCNAVSHGSVTHAAYTRGNTCVIQMFGGDKGAAAIAICCRYRPLDQQSNNNHEQNT

SEQ ID NO: 112 - protein, 659 aa, Artificial Sequence
  synthetic
MHLVLVLCLAALAACDYSEDKEVKAPQLDHPDPGTERVAELLRCTKSVWRIPEQYLVVLREGTRDSHVQRTVSTLRAQAARRGHAIHIMHTYSGVFHGFLIKMSSEVLPMALKLPHVAYIEEDSSIFAQSIPWNLQRIIQTKHETGKYTPPNDGAQVTVFLLDTSVQTDHREIEGKVMVTDFNSMPKEDGTRFHRSASKCESHGTHIAGVLSGRDAGVARGVSVNTVRVLNCQGRGTVSGALAGLEYIRASLQAQPVSPVIILLPFVGGFSRTLNTACREMVHSGAVLIAAAGNYQDDACMYSPASEPEVITVGASNAADRPLSSGTTGTNLGRCVDVFAPGEDIISASGDCSTCFVSMSGTSQSAAHAAGIAAVLLNAYPSASPAEVLQLLRYHAVQRVINPDSLPPEHYLTTPDMVAALPTSAATGEKLLCRSVWSKRSGVGSFDTAVARCRHGEEMFSCSSYSPNGVHAGERIEIRDGQKVCEAHHGIGGQGVYAVARCCTGSRVKCHASASLHVGIDAECPSQEFQLTGCSSHYIRSQDVAQPSWPLHCNRKACPAGEGGTSHAFCCHAPNLECHLIEHHQSEFTKQVEVSCEDSWTLTGCNAVSHGSVTHAAYTRGNTCVIQMFGGDKGAAAIAICCRYRPLDQQSNNNHEQNT

SEQ ID NO: 113 - protein, 452 aa, Artificial Sequence
  synthetic
MKNLDCWVDNEEDIDVILKKSTILNLDINNDIISDISGFNSSVITYPDAQLVPGINGKAIHLVNNESSEVIVHKAMDIEYNDMFNNFTVSFWLRVPKVSASHLEQYGTNEYSIISSMKKHSLSIGSGWSVSLKGNNLIWTLKDSAGEVRQITFRDLPDKFNAYLANKWVFITITNDRLSSANLYINGVLMGSAEITGLGAIREDNNITLKLDRCNNNNQYVSIDKFRIFCKALNPKEIEKLYTSYLSITFLRDFWGNPLRYDTEYYLIPVASSSKDVQLKNITDYMYLTNAPSYTNGKLNIYYRRLYNGLKFIIKRYTPNNEIDSFVKSGDFIKLYVSYNNNEHIVGYPKDGNAFNNLDRILRVGYNAPGIPLYKKMEAVKLRDLKTYSVQLKLYDDKNASLGLVGTHNGQIGNDPNRDILIASNWYFNHLKDKILGCDWYFVPTDEGWTND

SEQ ID NO: 114 - protein, 1163 aa, Artificial Sequence
  synthetic
MHLVLVLCLAALAACDYSEDKEVKAPQLDHPDPGTERVAELLRCTKSVWRIPEQYLVVLREGTRDSHVQRTVSTLRAQAARRGHAIHIMHTYSGVFHGFLIKMSSEVLPMALKLPHVAYIEEDSSIFAQSIPWNLQRIIQTKHETGKYTPPNDGAQVTVFLLDTSVQTDHREIEGKVMVTDFNSMPKEDGTRFHRSASKCESHGTHIAGVLSGRDAGVARGVSVNTVRVLNCQGRGTVSGALAGLEYIRASLQAQPVSPVIILLPFVGGFSRTLNTACREMVHSGAVLIAAAGNYQDDACMYSPASEPEVITVGASNAADRPLSSGTTGTNLGRCVDVFAPGEDIISASGDCSTCFVSMSGTSQSAAHAAGIAAVLLNAYPSASPAEVLQLLRYHAVQRVINPDSLPPEHYLTTPDMVAALPTSAATGEKLLCRSVWSKRSGVGSFDTAVARCRHGEEMFSCSSYSPNGVHAGERIEIRDGQKVCEAHHGIGGQGVYAVARCCTGSRVKCHASASLHVGIDAECPSQEFQLTGCSSHYIRSQDVAQPSWPLHSNRKACPAGEGGTSHAFCCHAPNLECHLIEHHQSEFTKQVEVSCEDSWTLTGCNAVSHGSVTHAAYTRGNTCVIQMFGGDKGAAAIAICCRYRPLDQQSNNNHEQNTGGGGSGGGGSMKNLDCWVDNEEDIDVILKKSTILNLDINNDIISDISGFNSSVITYPDAQLVPGINGKAIHLVNNESSEVIVHKAMDIEYNDMFNNFTVSFWLRVPKVSASHLEQYGTNEYSIISSMKKHSLSIGSGWSVSLKGNNLIWTLKDSAGEVRQITFRDLPDKFNAYLANKWVFITITNDRLSSANLYINGVLMGSAEITGLGAIREDNNITLKLDRCNNNNQYVSIDKFRIFCKALNPKEIEKLYTSYLSITFLRDFWGNPLRYDTEYYLIPVASSSKDVQLKNITDYMYLTNAPSYTNGKLNIYYRRLYNGLKFIIKRYTPNNEIDSFVKSGDFIKLYVSYNNNEHIVGYPKDGNAFNNLDRILRVGYNAPGIPLYKKMEAVKLRDLKTYSVQLKLYDDKNASLGLVGTHNGQIGNDPNRDILIASNWYFNHLKDKILGCDWYFVPTDEGWTNDGGGLVPQQSGAHIVMVDAYKPTKGSGHHHHHHSAWSHPQFEK

SEQ ID NO: 115 - protein, 701 aa, Artificial Sequence
  synthetic
MHLVLVLCLAALAACDYSEDKEVKAPQLDHPDPGTERVAELLRCTKSVWRIPEQYLVVLREGTRDSHVQRTVSTLRAQAARRGHAIHIMHTYSGVFHGFLIKMSSEVLPMALKLPHVAYIEEDSSIFAQSIPWNLQRIIQTKHETGKYTPPNDGAQVTVFLLDTSVQTDHREIEGKVMVTDFNSMPKEDGTRFHRSASKCESHGTHIAGVLSGRDAGVARGVSVNTVRVLNCQGRGTVSGALAGLEYIRASLQAQPVSPVIILLPFVGGFSRTLNTACREMVHSGAVLIAAAGNYQDDACMYSPASEPEVITVGASNAADRPLSSGTTGTNLGRCVDVFAPGEDIISASGDCSTCFVSMSGTSQSAAHAAGIAAVLLNAYPSASPAEVLQLLRYHAVQRVINPDSLPPEHYLTTPDMVAALPTSAATGEKLLCRSVWSKRSGVGSFDTAVARCRHGEEMFSCSSYSPNGVHAGERIEIRDGQKVCEAHHGIGGQGVYAVARCCTGSRVKCHASASLHVGIDAECPSQEFQLTGCSSHYIRSQDVAQPSWPLHSNRKACPAGEGGTSHAFCCHAPNLECHLIEHHQSEFTKQVEVSCEDSWTLTGCNAVSHGSVTHAAYTRGNTCVIQMFGGDKGAAAIAICCRYRPLDQQSNNNHEQNTGGGLVPQQSGAHIVMVDAYKPTKGSGHHHHHHSAWSHPQFEK

SEQ ID NO: 116 - protein, 1235 aa, Artificial Sequence
  synthetic
MHLVLVLCLAALAACDYSEDKEVKAPQLDHPDPGTERVAELLRCTKSVWRIPEQYLVVLREGTRDSHVQRTVSTLRAQAARRGHAIHIMHTYSGVFHGFLIKMSSEVLPMALKLPHVAYIEEDSSIFAQSIPWNLQRIIQTKHETGKYTPPNDGAQVTVFLLDTSVQTDHREIEGKVMVTDFNSMPKEDGTRFHRSASKCESHGTHIAGVLSGRDAGVARGVSVNTVRVLNCQGRGTVSGALAGLEYIRASLQAQPVSPVIILLPFVGGFSRTLNTACREMVHSGAVLIAAAGNYQDDACMYSPASEPEVITVGASNAADRPLSSGTTGTNLGRCVDVFAPGEDIISASGDCSTCFVSMSGTSQSAAHAAGIAAVLLNAYPSASPAEVLQLLRYHAVQRVINPDSLPPEHYLTTPDMVAALPTSAATGEKLLCRSVWSKRSGVGSFDTAVARCRHGEEMFSCSSYSPNGVHAGERIEIRDGQKVCEAHHGIGGQGVYAVARCCTGSRVKCHASASLHVGIDAECPSQEFQLTGCSSHYIRSQDVAQPSWPLHSNRKACPAGEGGTSHAFCCHAPNLECHLIEHHQSEFTKQVEVSCEDSWTLTGCNAVSHGSVTHAAYTRGNTCVIQMFGGDKGAAAIAICCRYRPLDQQSNNNHEQNTGGSGGMKNLDCWVDNEEDIDVILKKSTILNLDINNDIISDISGFNSSVITYPDAQLVPGINGKAIHLVNNESSEVIVHKAMDIEYNDMFNNFTVSFWLRVPKVSASHLEQYGTNEYSIISSMKKHSLSIGSGWSVSLKGNNLIWTLKDSAGEVRQITFRDLPDKFNAYLANKWVFITITNDRLSSANLYINGVLMGSAEITGLGAIREDNNITLKLDRCNNNNQYVSIDKFRIFCKALNPKEIEKLYTSYLSITFLRDFWGNPLRYDTEYYLIPVASSSKDVQLKNITDYMYLTNAPSYTNGKLNIYYRRLYNGLKFIIKRYTPNNEIDSFVKSGDFIKLYVSYNNNEHIVGYPKDGNAFNNLDRILRVGYNAPGIPLYKKMEAVKLRDLKTYSVQLKLYDDKNASLGLVGTHNGQIGNDPNRDILIASNWYFNHLKDKILGCDWYFVPTDEGWTNDGSGDSATHIKFSKRDEDGKELAGATMELRDSSGKTISTWISDGQVKDFYLYPGKYTFVETAAPDGYEVATAITFTVNEQGQVTVNGKATKGDAHIGGLVPRGSHHHHHHSAWSHPQFEK

SEQ ID NO: 117 - protein, 778 aa, Artificial Sequence
  synthetic
MHLVLVLCLAALAACDYSEDKEVKAPQLDHPDPGTERVAELLRCTKSVWRIPEQYLVVLREGTRDSHVQRTVSTLRAQAARRGHAIHIMHTYSGVFHGFLIKMSSEVLPMALKLPHVAYIEEDSSIFAQSIPWNLQRIIQTKHETGKYTPPNDGAQVTVFLLDTSVQTDHREIEGKVMVTDFNSMPKEDGTRFHRSASKCESHGTHIAGVLSGRDAGVARGVSVNTVRVLNCQGRGTVSGALAGLEYIRASLQAQPVSPVIILLPFVGGFSRTLNTACREMVHSGAVLIAAAGNYQDDACMYSPASEPEVITVGASNAADRPLSSGTTGTNLGRCVDVFAPGEDIISASGDCSTCFVSMSGTSQSAAHAAGIAAVLLNAYPSASPAEVLQLLRYHAVQRVINPDSLPPEHYLTTPDMVAALPTSAATGEKLLCRSVWSKRSGVGSFDTAVARCRHGEEMFSCSSYSPNGVHAGERIEIRDGQKVCEAHHGIGGQGVYAVARCCTGSRVKCHASASLHVGIDAECPSQEFQLTGCSSHYIRSQDVAQPSWPLHSNRKACPAGEGGTSHAFCCHAPNLECHLIEHHQSEFTKQVEVSCEDSWTLTGCNAVSHGSVTHAAYTRGNTCVIQMFGGDKGAAAIAICCRYRPLDQQSNNNHEQNTGSGDSATHIKFSKRDEDGKELAGATMELRDSSGKTISTWISDGQVKDFYLYPGKYTFVETAAPDGYEVATAITFTVNEQGQVTVNGKATKGDAHIGGLVPRGSHHHHHHSAWSHPQFEK

SEQ ID NO: 118 - protein, 781 aa, Artificial Sequence
  synthetic
MHLVLVLCLAALAACDYSEDKEVKAPQLDHPDPGTERVAELLRCTKSVWRIPEQYLVVLREGTRDSHVQRTVSTLRAQAARRGHAIHIMHTYSGVFHGFLIKMSSEVLPMALKLPHVAYIEEDSSIFAQSIPWNLQRIIQTKHETGKYTPPNDGAQVTVFLLDTSVQTDHREIEGKVMVTDFNSMPKEDGTRFHRSASKCESHGTHIAGVLSGRDAGVARGVSVNTVRVLNCQGRGTVSGALAGLEYIRASLQAQPVSPVIILLPFVGGFSRTLNTACREMVHSGAVLIAAAGNYQDDACMYSPASEPEVITVGASNAADRPLSSGTTGTNLGRCVDVFAPGEDIISASGDCSTCFVSMSGTSQSAAHAAGIAAVLLNAYPSASPAEVLQLLRYHAVQRVINPDSLPPEHYLTTPDMVAALPTSAATGEKLLCRSVWSKRSGVGSFDTAVARCRHGEEMFSCSSYSPNGVHAGERIEIRDGQKVCEAHHGIGGQGVYAVARCCTGSRVKCHASASLHVGIDAECPSQEFQLTGCSSHYIRSQDVAQPSWPLHSNRKACPAGEGGTSHAFCCHAPNLECHLIEHHQSEFTKQVEVSCEDSWTLTGCNAVSHGSVTHAAYTRGNTCVIQMFGGDKGAAAIAICCRYRPLDQQSNNNHEQNTGGGGSGDSATHIKFSKRDEDGKELAGATMELRDSSGKTISTWISDGQVKDFYLYPGKYTFVETAAPDGYEVATAITFTVNEQGQVTVNGKATKGDAHIGGLVPRGSHHHHHHSAWSHPQFEK

SEQ ID NO: 119 - protein, 285 aa, Artificial Sequence
  synthetic
MEFLKRSFAPLTEKQWQEIDNRAREIFKTQLYGRKFVDVEGPYGWEYAAHPLCEVEVLSDENEVVKWGLRKSLPLIELRATFTLDLWELDNLECGKPNVDLSSLEETVRKVAEFEDEVIFRGCEKSGVKGLLSFEERKIECGSTPKDLLEAIVRALSIFSKDGIEGPYTLVINTDRWINFLKEEAGHYPLEKRVEECLRGGKIITTPRIEDALVVSERGGDFKLILGQDLSIGYEDREKDAVRLFITETFTFQVVNPEALILLKFGSGSGSVPTIVMVDAYKRYK

SEQ ID NO: 120 - protein, 389 aa, Artificial Sequence
  synthetic
MEFLKRSFAPLTEKQWQEIDNRAREIFKTQLYGRKFVDVEGPYGWEYAAHPLCEVEVLSDENEVVKWGLRKSLPLIELRATFTLDLWELDNLECGKPNVDLSSLEETVRKVAEFEDEVIFRGCEKSGVKGLLSFEERKIECGSTPKDLLEAIVRALSIFSKDGIEGPYTLVINTDRWINFLKEEAGHYPLEKRVEECLRGGKIITTPRIEDALVVSERGGDFKLILGQDLSIGYEDREKDAVRLFITETFTFQVVNPEALILLKFGSGSGSVTTLSGLSGEQGPSGDMTTEEDSATHIKFSKRDEDGRELAGATMELRDSSGKTISTWISDGHVKDFYLYPGKYTFVETAAPDGYEVATAITFTVNEQGQVTVNGEATKGDAHTGSSGS

SEQ ID NO: 121 - protein, 226 aa, Artificial Sequence
  synthetic
MDSKGSSQKGSRLLLLLVVSNLLLPQGVVGAHIVMVDAYKPTKGSGSAMQIYEGKLTAEGLRFGIVASRFNHALVDRLVEGAIDAIVRHGGREEDITLVRVPGSWEIPVAAGELARKENISAVIAIGVLIRGATPHFDYIASEVSKGLADLSLELRKPITFGVITADTLEQAIERAGTKHGNKGWEAALSAIEMANLFKSLRGGLVPRGSHHHHHHSAWSHPQFEK

SEQ ID NO: 122 - protein, 244 aa, Artificial Sequence
  synthetic
MDSKGSSQKGSRLLLLLVVSNLLLPQGVVGQHHHHHHHHSAWSHPQFEKGGLVPRGGAHIVMVDAYKPTKGGGSGDPMLSKDIIKLLNEQVNKEMQSSNLYMSMSSWCYTHSLDGAGLFLFDHAAEEYEHAKKLIIFLNENNVPVQLTSISAPEHKFEGLTQIFQKAYEHEQNISESINNIVDHAIKSKDHATFNFLQWYVAEQHEEEVLFKDILDKIELIGNENHGLYLADQYVKGIAKSRKS

SEQ ID NO: 123 - protein, 781 aa, Artificial Sequence
  synthetic
MHLVLVLCLAALAACDYSEDQEVKAPQLDHPDPGTERVAELLRCTKSVWRIPEQYLVVLREGTRDSHVQRTVSTLRAQAARRGHAIHIMHTYSGVFHGFLIKMSSEVLPMALKLPHVAYIEEDSSIFAQSIPWNLQRIIQTKHETGKYTPPNDGAQVTVFLLDTSVQTDHREIEGKVMVTDFNSMPKEDGTRFHESASKCESHGTHIAGVLSGRDAGVARGVSVNTVRVLNCQGRGTVSGALAGLEYIRASLQAQPVSPVIILLPFVGGFSRTLNTACREMVHSGAVLIAAAGNYQDDACMYSPASEPEVITVGASNAADRPLSSGTTGTNLGRCVDVFAPGEDIISASGDCSTCFVSMSGTSQSAAHAAGIAAVLLNAYPSASPAEVLQLLRYHAVQRVINPDSLPPEHYLTTPDMVAALPTSAATGEKLLCRSVWSKRSGVGSFDTAVARCRHGEEMFSCSSYSPNGVHAGERIEIRDGQKVCEAHHGIGGQGVYAVARCCTGSRVKCHASASLHVGIDAECPSQEFQLTGCSSHYIRSQDVAQPSWPLHSNRKACPAGEGGTSHAFCCHAPNLECHLIEHHQSEFTKQVEVSCEDSWTLTGCNAVSHGSVTHAAYTRGNTCVIQMFGGDKGAAAIAICCRYRPLDQQSNNNHEQNTGSGDSATHIKFSKRDEDGKELAGATMELRDSSGKTISTWISDGQVKDFYLYPGKYTFVETAAPDGYEVATAITFTVNEQGQVTVNGKATKGDAHIGGLEVLFQGPGHHHHHHSAWSHPQFEK

SEQ ID NO: 124 - protein, 781 aa, Artificial Sequence
  synthetic
MHLVLVLCLAALAACDYSEDKEVKAPQLDHPKPGTERVAELLRCTKSVWRIPEQYLVVLREGTRDSHVQRTVSTLRAQAARRGHAIHIMHTYSGVFHGFLIKMSSEVLPMALKLPHVAYIEEDSSIFAQSIPWNLQRIIQTKHETGKYTPPNDGAQVTVFLLDTSVQTDHREIEGKVMVTDFNSMPKEDGTRFHQSASKCESHGTHIAGVLSGRDSGVARGVSVNTVRVLNCQGRGTVSGALAGLEYIRASLQAQPVSPVIILLPFVGGFSRTLNTACREMVHSGAVLIAAAGNYQDDACMYSPASEPEVITIGASNAADRPLSSGTTGTNLGRCVDVFAPGEDIVSASGDCSTCFTSMSGTSQSAAHAAGIAAVLLNAYPSASPAEVLQLLRYHAVQRVINPDSLPPEHYLTTPDMVAALPTSAATGEKLLCRSVWSKRSGVGSFDTAVARCRHGEEMFSCSSYSPNGVHAGERIEIRDGQKVCEAHHGIGGQGVYAVARCCTGSRVKCHASASLHVGIDAECPSQEFQLTGCSSHYIRSQDVAQPSWPLHSNRKACPAGEGGTSHAFCCHAPNLECHLIEHHQSEFTKQVEVSCEDSWTLTGCNAVSHGSVTHAAYTRGNTCVIQMFGGDKGAAAIAICCRYRPLDQQSNNNHEQNTGSGDSATHIKFSKRDEDGKELAGATMELRDSSGKTISTWISDGQVKDFYLYPGKYTFVETAAPDGYEVATAITFTVNEQGQVTVNGKATKGDAHIGGLEVLFQGPGHHHHHHSAWSHPQFEK

SEQ ID NO: 125 - protein, 781 aa, Artificial Sequence
  synthetic
MHLVLVLCLAALAACDYSEDQEVKAPQLDHPDPGTERVAELLRCTKSVWRIPEQYLVVLREGTNDTHVQRTVSTLRAQAARRGHAIHIMHTYSGVFHGFLIKMSSEVLPMALKLPHVAYIEEDSSIFAQSIPWNLQRIIQTKHETGKYTPPNDGAQVTVFLLDTSVQTDHREIEGKVMVTDFNSMPKEDGTRFHESASKCESHGTHIAGVLSGRDAGVARGVSVNTVRVLNCQGRGTVSGALAGLEYIRASLQAQPVSPVIILLPFVGGFSRTLNTACREMVHSGAVLIAAAGNYQDDACMYSPASEPEVITVGASNAADRPLSSGTTGTNLGRCVDVFAPGEDIISASGDCSTCFVSMSGTSQSAAHAAGIAAVLLNAYPSASPAEVLQLLRYHAVQRVINPDSLPPEHYLTTPDMVAALPTSAATGEKLLCRSVWSKRSGVGSFDTAVARCRHGEEMFSCSSYSPNGVHAGERIEIRDGQKVCEAHHGIGGQGVYAVARCCTGSRVKCHASASLHVGIDAECPSQEFQLTGCSSHYIRSQDVAQPSWPLHSNRKACPAGEGGTSHAFCCHAPNLECHLIEHHQSEFTKQVEVSCEDSWTLTGCNAVSHGSVTHAAYTRGNTCVIQMFGGDKGAAAIAICCRYRPLDQQSNNNHEQNTGSGDSATHIKFSKRDEDGKELAGATMELRDSSGKTISTWISDGQVKDFYLYPGKYTFVETAAPDGYEVATAITFTVNEQGQVTVNGKATKGDAHIGGLEVLFQGPGHHHHHHSAWSHPQFEK

SEQ ID NO: 126 - protein, 781 aa, Artificial Sequence
  synthetic
MHLVLVLCLAALAACDYSEDQEVKAPQLDHPDPGTERVAELLRCTKSVWRIPEQYLVVLREGTRDSHVQRTVSTLRAQAARRGNATHIMHTYSGVFHGFLIKMSSEVLPMALKLPHVAYIEEDSSIFAQSIPWNLQRIIQTKHETGKYTPPNDGAQVTVFLLDTSVQTDHREIEGKVMVTDFNSMPKEDGTRFHESASKCESHGTHIAGVLSGRDAGVARGVSVNTVRVLNCQGRGTVSGALAGLEYIRASLQAQPVSPVIILLPFVGGFSRTLNTACREMVHSGAVLIAAAGNYQDDACMYSPASEPEVITVGASNAADRPLSSGTTGTNLGRCVDVFAPGEDIISASGDCSTCFVSMSGTSQSAAHAAGIAAVLLNAYPSASPAEVLQLLRYHAVQRVINPDSLPPEHYLTTPDMVAALPTSAATGEKLLCRSVWSKRSGVGSFDTAVARCRHGEEMFSCSSYSPNGVHAGERIEIRDGQKVCEAHHGIGGQGVYAVARCCTGSRVKCHASASLHVGIDAECPSQEFQLTGCSSHYIRSQDVAQPSWPLHSNRKACPAGEGGTSHAFCCHAPNLECHLIEHHQSEFTKQVEVSCEDSWTLTGCNAVSHGSVTHAAYTRGNTCVIQMFGGDKGAAAIAICCRYRPLDQQSNNNHEQNTGSGDSATHIKFSKRDEDGKELAGATMELRDSSGKTISTWISDGQVKDFYLYPGKYTFVETAAPDGYEVATAITFTVNEQGQVTVNGKATKGDAHIGGLEVLFQGPGHHHHHHSAWSHPQFEK

SEQ ID NO: 127 - protein, 781 aa, Artificial Sequence
  synthetic
MHLVLVLCLAALAACDYSEDQEVKAPQLDHPDPGTERVAELLRCTKSVWRIPEQYLVVLREGTRDSHVQRTVSTLRAQAARRGHAIHIMHTYSGVFHGFLIKMSSEVLPMALKLPHVAYIEEDSSIFAQSIPWNLQRIIQTKHETGKYTPPNDGAQVTVFLLDTSVQTDHREIEGKVMVTDFNSMPKEDGTRFHESASKCESHGTHIAGVLSGRDAGVARGVSVNTVRVLNCQGRGTVSGALAGLEYIRASLQAQPVSPVIILLPFVGGFSRTLNTACREMVHSGAVLIAAAGNYQDDACMYSPASEPEVITVGASNAADRPLSSGTTGTNLGRCVDVFAPGEDIISASGDCSTCFVSMSGTSQSAAHAAGIAAVLLNAYPSASPAEVLQLLRYHAVQRVINPDSLPPEHYLTTPDMVAALPTSAATGEKLLCRSVWSKRSGVGSFDTAVARCRHGEEMFSCSSYSPNGVHAGERIEIRDGQKVCEAHHGIGGQGVYAVARCCTGSRVKCHASASLHVGIDAECPSQEFQLTGCSSHYIRSQDVAQPSWPLHNNSKACPAGEGGTSHAFCCHAPNLECHLIEHHQSEFTKQVEVSCEDSWTLTGCNAVSHGSVTHAAYTRGNTCVIQMFGGDKGAAAIAICCRYRPLDQQSNNNHEQNTGSGDSATHIKFSKRDEDGKELAGATMELRDSSGKTISTWISDGQVKDFYLYPGKYTFVETAAPDGYEVATAITFTVNEQGQVTVNGKATKGDAHIGGLEVLFQGPGHHHHHHSAWSHPQFEK

SEQ ID NO: 128 - protein, 781 aa, Artificial Sequence
  synthetic
MHLVLVLCLAALAACDYSEDQEVKAPQLDHPDPGTERVAELLRCTKSVWRIPEQYLVVLREGTRDSHVQRTVSTLRAQAARRGHAIHIMHTYSGVFHGFLIKMSSEVLPMALKLPHVAYIEEDSSIFAQSIPWNLQRIIQTKHETGKYTPPNDGAQVTVFLLDTSVQTDHREIEGKVMVTDFNSMPKEDGTRFHESASKCESHGTHIAGVLSGRDAGVARGVSVNTVRVLNCQGRGTVSGALAGLEYIRASLQAQPVSPVIILLPFVGGFSRTLNTACREMVHSGAVLIAAAGNYQDDACMYSPASEPEVITVGASNAADRPLSSGTTGTNLGRCVDVFAPGEDIISASGDCSTCFVSMSGTSQSAAHAAGIAAVLLNAYPSASPAEVLQLLRYHAVQRVINPDSLPPEHYLTTPDMVAALPTSAATGEKLLCRSVWSKRSGVGSNDSAVARCRHGEEMFSCSSYSPNGVHAGERIEIRDGQKVCEAHHGIGGQGVYAVARCCTGSRVKCHASASLHVGIDAECPSQEFQLTGCSSHYIRSQDVAQPSWPLHSNRKACPAGEGGTSHAFCCHAPNLECHLIEHHQSEFTKQVEVSCEDSWTLTGCNAVSHGSVTHAAYTRGNTCVIQMFGGDKGAAAIAICCRYRPLDQQSNNNHEQNTGSGDSATHIKFSKRDEDGKELAGATMELRDSSGKTISTWISDGQVKDFYLYPGKYTFVETAAPDGYEVATAITFTVNEQGQVTVNGKATKGDAHIGGLEVLFQGPGHHHHHHSAWSHPQFEK

SEQ ID NO: 129 - protein, 781 aa, Artificial Sequence
  synthetic
MHLVLVLCLAALAACDYSEDQEVKAPQLDHPDPGTERVAELLRCTKSVWRIPEQYLVVLREGTRDSHVQRTVSTLRAQAARRGHAIHIMHTYSGVFHGFLIKMSSEVLPMALKLPHVAYIEEDSSIFAQSIPWNLQRIIQTKHETGKYTPPNDGAQVTVFLLDTSVQTDHREIEGKVMVTDFNSMPKEDGTRFHESASKCESHGTHIAGVLSGRDAGVARGVSVNTVRVLNCQGRGTVSGALAGLEYIRASLQAQPVSPVIILLPFVGGFSRTLNTACREMVHSGAVLIAAAGNYQDDACMYSPASEPEVITVGASNAADRPLSSGTTGTNLGRCVDVFAPGEDIISASGDCSTCFVSMSGTSQSAAHAAGIAAVLLNAYPSASPAEVLQLLRYHAVQRVINPDSLPPEHYLTTPDMVAALPTSAATGEKLLCRSVWSKRSGVGSFDTAVARCRHGEEMFSCSSYSPNGVHAGERIEIRDGQKVCEAHHGIGGQGVYAVARCCTGSRVKCHASASLHVGIDAECPSQEFQLTGCSSHYIRSQDVAQPSWPLHSNRKACPAGEGGTSHAFCCHAPNLECHLIEHHQSENTTQVEVSCEDSWTLTGCNAVSHGSVTHAAYTRGNTCVIQMFGGDKGAAAIAICCRYRPLDQQSNNNHEQNTGSGDSATHIKFSKRDEDGKELAGATMELRDSSGKTISTWISDGQVKDFYLYPGKYTFVETAAPDGYEVATAITFTVNEQGQVTVNGKATKGDAHIGGLEVLFQGPGHHHHHHSAWSHPQFEK

SEQ ID NO: 130 - protein, 781 aa, Artificial Sequence
  synthetic
MHLVLVLCLAALAACDYSEDQEVKAPQLDHPDPGTERVAELLRCTKSVWRIPEQYLVVLREGTRDSHVQRTVSTLRAQAARRGHAIHIMHTYSGVFHGFLIKMSSEVLPMALKLPHVAYIEEDSSIFAQSIPWNLQRIIQTKHETGKYTPPNDGAQVTVFLLDTSVQTDHREIEGKVMVTDFNSMPKEDGTRFHESASKCESHGTHIAGVLSGRDAGVARGVSVNTVRVLNCQGRGTVSGALAGLEYIRASLQAQPVSPVIILLPFVGGFSRTLNTACREMVHSGAVLIAAAGNYQDDACMYSPASEPEVITVGASNAADRPLSSGTTGTNLGRCVDVFAPGEDIISASGDCSTCFVSMSGTSQSAAHAAGIAAVLLNAYPSASPAEVLQLLRYHAVQRVINPDSLPPEHYLTTPDMVAALPTSAATGEKLLCRSVWSKRSGVGSFDTAVARCRHGEEMFSCSSYSPNGVHAGERIEIRDGNKSCEAHHGIGGQGVYAVARCCTGSRVKCHASASLHVGIDAECPSQEFQLTGCSSHYIRSQDVAQPSWPLHSNRKACPAGEGGTSHAFCCHAPNLECHLIEHHQSEFTKQVEVSCEDSWTLTGCNAVSHGSVTHAAYTRGNTCVIQMFGGDKGAAAIAICCRYRPLDQQSNNNHEQNTGSGDSATHIKFSKRDEDGKELAGATMELRDSSGKTISTWISDGQVKDFYLYPGKYTFVETAAPDGYEVATAITFTVNEQGQVTVNGKATKGDAHIGGLEVLFQGPGHHHHHHSAWSHPQFEK

SEQ ID NO: 131 - protein, 781 aa, Artificial Sequence
  synthetic
MHLVLVLCLAALAACDYSEDQEVKAPQLDHPDPGTERVAELLRCTKSVWRIPEQYLVVLREGTRDSHVQRTVSTLRAQAARRGHAIHIMHTYSGVFHGFLIKMSSEVLPMALKLPHVAYIEEDSSIFAQSIPWNLQRIIQTKHETGKYTPPNDGAQVTVFLLDTSVQTDHREIEGKVMVTDFNSMPKEDGTRFHESASKCESHGTHIAGVLSGRDAGVARGVSVNTVRVLNCQGRGTVSGALAGLEYIRASLQAQPVSPVIILLPFVGGFSRTLNTACREMVHSGAVLIAAAGNYQDDACMYSPASEPEVITVGASNAADRPLSSGTTGTNLGRCVDVFAPGEDIISASGDCSTCFVSMSGTSQSAAHAAGIAAVLLNAYPSASPAEVLQLLRYHAVQRVINPDSLPPEHYLTTPDMVAALPTSAATGEKLLCRSVWSKRSGVGSFDTAVARCRHGEEMFSCSSYSPNGVHAGERIEIRDGQKVCEAHHGIGGQGVYAVARCCTGSRVKCHASASLHVGIDAECPSQEFQLTGCSSHYIRSQDVAQPSWPLHSNRKACPAGEGGTSHAFCCHAPNLECHLIEHHQSEFTKQVEVSCENSTTLTGCNAVSHGSVTHAAYTRGNTCVIQMFGGDKGAAAIAICCRYRPLDQQSNNNHEQNTGSGDSATHIKFSKRDEDGKELAGATMELRDSSGKTISTWISDGQVKDFYLYPGKYTFVETAAPDGYEVATAITFTVNEQGQVTVNGKATKGDAHIGGLEVLFQGPGHHHHHHSAWSHPQFEK

SEQ ID NO: 132 - protein, 781 aa, Artificial Sequence
  synthetic
MHLVLVLCLAALAACDYSEDQEVKAPQLDHPDPGTERVAELLRCTKSVWRIPEQYLVVLREGTRDSHVQRTVSTLRAQAARRGHAIHIMHTYSGVFHGFLIKMSSEVLPMALKLPHVAYIEEDSSIFAQSIPWNLQRIIQTKHETGKYTPPNDGAQVTVFLLDTSVQTDHREIEGKVMVTDFNSMPKEDGTRFHESASKCESHGTHIAGVLSGRDAGVARGVSVNTVRVLNCQGRGTVSGALAGLEYIRASLQAQPVSPVIILLPFVGGFSRTLNTACREMVHSGAVLIAAAGNYQDDACMYSPASEPEVITVGASNAADRPLSSGTTGTNLGRCVDVFAPGEDIISASGDCSTCFVSMSGTSQSAAHAAGIAAVLLNAYPSASPAEVLQLLRYHAVQRVINPDSLPPEHYLTTPDMVAALPTSAANGTKLLCRSVWSKRSGVGSFDTAVARCRHGEEMFSCSSYSPNGVHAGERIEIRDGQKVCEAHHGIGGQGVYAVARCCTGSRVKCHASASLHVGIDAECPSQEFQLTGCSSHYIRSQDVAQPSWPLHSNRKACPAGEGGTSHAFCCHAPNLECHLIEHHQSEFTKQVEVSCEDSWTLTGCNAVSHGSVTHAAYTRGNTCVIQMFGGDKGAAAIAICCRYRPLDQQSNNNHEQNTGSGDSATHIKFSKRDEDGKELAGATMELRDSSGKTISTWISDGQVKDFYLYPGKYTFVETAAPDGYEVATAITFTVNEQGQVTVNGKATKGDAHIGGLEVLFQGPGHHHHHHSAWSHPQFEK

SEQ ID NO: 133 - protein, 781 aa, Artificial Sequence
  synthetic
MHLVLVLCLAALAACDYSEDQEVKAPQLDHPDPGTERVAELLRCTKSVWRIPEQYLVVLREGTRDSHVQRTVSTLRAQAARRGHAIHIMHTYSGVFHGFLIKMSSEVLPMALKLPHVAYIEEDSSIFAQSIPWNLQRIIQTKHETGKYTPPNDGAQVTVFLLDTSVQTDHREIEGKVMVTDFNSSPKEDGTRFHESASKCESHGTHIAGVLSGRDAGVARGVSVNTVRVLNCQGRGTVSGALAGLEYIRASLQAQPVSPVIILLPFVGGFSRTLNTACREMVHSGAVLIAAAGNYQDDACMYSPASEPEVITVGASNAADRPLSSGTTGTNLGRCVDVFAPGEDIISASGDCSTCFVSMSGTSQSAAHAAGIAAVLLNAYPSASPAEVLQLLRYHAVQRVINPDSLPPEHYLTTPDMVAALPTSAATGEKLLCRSVWSKRSGVGSFDTAVARCRHGEEMFSCSSYSPNGVHAGERIEIRDGQKVCEAHHGIGGQGVYAVARCCTGSRVKCHASASLHVGIDAECPSQEFQLTGCSSHYIRSQDVAQPSWPLHSNRKACPAGEGGTSHAFCCHAPNLECHLIEHHQSEFTKQVEVSCEDSWTLTGCNAVSHGSVTHAAYTRGNTCVIQMFGGDKGAAAIAICCRYRPLDQQSNNNHEQNTGSGDSATHIKFSKRDEDGKELAGATMELRDSSGKTISTWISDGQVKDFYLYPGKYTFVETAAPDGYEVATAITFTVNEQGQVTVNGKATKGDAHIGGLEVLFQGPGHHHHHHSAWSHPQFEK

SEQ ID NO: 134 - protein, 781 aa, Artificial Sequence
  synthetic
MHLVLVLCLAALAACDYSEDQEVKAPQLDHPDPGTERVAELLRCTKSVWRIPEQYLVVLREGTRDSHVQRTVSTLRAQAARRGHAIHIMHTYSGVFHGFLIKMSSEVLPMALKLPHVAYIEEDSSIFAQSIPWNLQRIIQTKHETGKYTPPNDGANVSVFLLDTSVQTDHREIEGKVMVTDFNSMPKEDGTRFHESASKCESHGTHIAGVLSGRDAGVARGVSVNTVRVLNCQGRGTVSGALAGLEYIRASLQAQPVSPVIILLPFVGGFSRTLNTACREMVHSGAVLIAAAGNYQDDACMYSPASEPEVITVGASNAADRPLSSGTTGTNLGRCVDVFAPGEDIISASGDCSTCFVSMSGTSQSAAHAAGIAAVLLNAYPSASPAEVLQLLRYHAVQRVINPDSLPPEHYLTTPDMVAALPTSAATGEKLLCRSVWSKRSGVGSFDTAVARCRHGEEMFSCSSYSPNGVHAGERIEIRDGQKVCEAHHGIGGQGVYAVARCCTGSRVKCHASASLHVGIDAECPSQEFQLTGCSSHYIRSQDVAQPSWPLHSNRKACPAGEGGTSHAFCCHAPNLECHLIEHHQSEFTKQVEVSCEDSWTLTGCNAVSHGSVTHAAYTRGNTCVIQMFGGDKGAAAIAICCRYRPLDQQSNNNHEQNTGSGDSATHIKFSKRDEDGKELAGATMELRDSSGKTISTWISDGQVKDFYLYPGKYTFVETAAPDGYEVATAITFTVNEQGQVTVNGKATKGDAHIGGLEVLFQGPGHHHHHHSAWSHPQFEK

SEQ ID NO: 135 - protein, 706 aa, Artificial Sequence
  synthetic
MHLVLVLCLAALAACQGAHIVMVDAYKPTKGGSGGDYSEDQEVKAPQLDHPDPGTERVAELLRCTKSVWRIPEQYLVVLREGTNDTHVQRTVSTLRAQAARRGHAIHIMHTYSGVFHGFLIKMSSEVLPMALKLPHVAYIEEDSSIFAQSIPWNLQRIIQTKHETGKYTPPNDGAQVTVFLLDTSVQTDHREIEGKVMVTDFNSMPKEDGTRFHESASKCESHGTHIAGVLSGRDAGVARGVSVNTVRVLNCQGRGTVSGALAGLEYIRASLQAQPVSPVIILLPFVGGFSRTLNTACREMVHSGAVLIAAAGNYQDDACMYSPASEPEVITVGASNAADRPLSSGTTGTNLGRCVDVFAPGEDIISASGDCSTCFVSMSGTSQSAAHAAGIAAVLLNAYPSASPAEVLQLLRYHAVQRVINPDSLPPEHYLTTPDMVAALPTSAATGEKLLCRSVWSKRSGVGSFDTAVARCRHGEEMFSCSSYSPNGVHAGERIEIRDGQKVCEAHHGIGGQGVYAVARCCTGSRVKCHASASLHVGIDAECPSQEFQLTGCSSHYIRSQDVAQPSWPLHSNRKACPAGEGGTSHAFCCHAPNLECHLIEHHQSEFTKQVEVSCEDSWTLTGCNAVSHGSVTHAAYTRGNTCVIQMFGGDKGAAAIAICCRYRPLDQQSNNNHEQNTGGLEVLFQGPGHHHHHHSAWSHPQFEK

SEQ ID NO: 136 - protein, 706 aa, Artificial Sequence
  synthetic
MHLVLVLCLAALAACQGAHIVMVDAYKPTKGGSGGDYSEDQEVKAPQLDHPDPGTERVAELLRCTKSVWRIPEQYLVVLREGTRDSHVQRTVSTLRAQAARRGNATHIMHTYSGVFHGFLIKMSSEVLPMALKLPHVAYIEEDSSIFAQSIPWNLQRIIQTKHETGKYTPPNDGAQVTVFLLDTSVQTDHREIEGKVMVTDFNSMPKEDGTRFHESASKCESHGTHIAGVLSGRDAGVARGVSVNTVRVLNCQGRGTVSGALAGLEYIRASLQAQPVSPVIILLPFVGGFSRTLNTACREMVHSGAVLIAAAGNYQDDACMYSPASEPEVITVGASNAADRPLSSGTTGTNLGRCVDVFAPGEDIISASGDCSTCFVSMSGTSQSAAHAAGIAAVLLNAYPSASPAEVLQLLRYHAVQRVINPDSLPPEHYLTTPDMVAALPTSAATGEKLLCRSVWSKRSGVGSFDTAVARCRHGEEMFSCSSYSPNGVHAGERIEIRDGQKVCEAHHGIGGQGVYAVARCCTGSRVKCHASASLHVGIDAECPSQEFQLTGCSSHYIRSQDVAQPSWPLHSNRKACPAGEGGTSHAFCCHAPNLECHLIEHHQSEFTKQVEVSCEDSWTLTGCNAVSHGSVTHAAYTRGNTCVIQMFGGDKGAAAIAICCRYRPLDQQSNNNHEQNTGGLEVLFQGPGHHHHHHSAWSHPQFEK

SEQ ID NO: 137 - protein, 705 aa, Artificial Sequence
  synthetic
MHLVLVLCLAALAACQGAHIVMVDAYKPTKGGSGGDYSEDQEVKAPQLDHPDPGTERVAELLRCTKSVWRIPEQYLVVLREGTRDSHVQRTVSTLRAQAARRGHAIHIMHTYSGVFHGFLIKMSSEVLPMALKLPHVAYIEEDSSIFAQSIPWNLQRIIQTKHETGKYTPPNDGAQVTVFLLDTSVQTDHREIEGKVMVTDFNSMPKEDGTRFHESASKCESHGTHIAGVLSGRDAGVARGVSVNTVRVLNCQGRGTVSGALAGLEYIRASLQAQPVSPVIILLPFVGGFSRTLNTACREMVHSGAVLIAAAGNYQDDACMYSPASEPEVITVGASNAADRPLSSGTTGTNLGRCVDVFAPGEDIISASGDCSTCFVSMSGTSQSAAHAAGIAAVLLNAYPSASPAEVLQLLRYHAVQRVINPDSLPPEHYLTTPDMVAALPTSAATGEKLLCRSVWSKRSGVGSFDTAVARCRHGEEMFSCSSYSPNGVHAGERIEIRDGQKVCEAHHGIGGQGVYAVARCCTGSRVKCHASASLHVGIDAECPSQEFQLTGCSSHYIRSQDVAQPSWPLHNNSKACPAGEGGTSHAFCCHAPNLECHLIEHHQSEFTKQVEVSCEDSWTLTGCNAVSHGSVTHAAYTRGNTCVIQMFGGDKGAAAIAICCRYRPLDQQSNNNHEQNGGLEVLFQGPGHHHHHHSAWSHPQFEK

SEQ ID NO: 138 - protein, 706 aa, Artificial Sequence
  synthetic
MHLVLVLCLAALAACQGAHIVMVDAYKPTKGGSGGDYSEDQEVKAPQLDHPDPGTERVAELLRCTKSVWRIPEQYLVVLREGTRDSHVQRTVSTLRAQAARRGHAIHIMHTYSGVFHGFLIKMSSEVLPMALKLPHVAYIEEDSSIFAQSIPWNLQRIIQTKHETGKYTPPNDGAQVTVFLLDTSVQTDHREIEGKVMVTDFNSMPKEDGTRFHESASKCESHGTHIAGVLSGRDAGVARGVSVNTVRVLNCQGRGTVSGALAGLEYIRASLQAQPVSPVIILLPFVGGFSRTLNTACREMVHSGAVLIAAAGNYQDDACMYSPASEPEVITVGASNAADRPLSSGTTGTNLGRCVDVFAPGEDIISASGDCSTCFVSMSGTSQSAAHAAGIAAVLLNAYPSASPAEVLQLLRYHAVQRVINPDSLPPEHYLTTPDMVAALPTSAATGEKLLCRSVWSKRSGVGSNDSAVARCRHGEEMFSCSSYSPNGVHAGERIEIRDGQKVCEAHHGIGGQGVYAVARCCTGSRVKCHASASLHVGIDAECPSQEFQLTGCSSHYIRSQDVAQPSWPLHSNRKACPAGEGGTSHAFCCHAPNLECHLIEHHQSEFTKQVEVSCEDSWTLTGCNAVSHGSVTHAAYTRGNTCVIQMFGGDKGAAAIAICCRYRPLDQQSNNNHEQNTGGLEVLFQGPGHHHHHHSAWSHPQFEK

SEQ ID NO: 139 - protein, 706 aa, Artificial Sequence
  synthetic
MHLVLVLCLAALAACQGAHIVMVDAYKPTKGGSGGDYSEDQEVKAPQLDHPDPGTERVAELLRCTKSVWRIPEQYLVVLREGTRDSHVQRTVSTLRAQAARRGHAIHIMHTYSGVFHGFLIKMSSEVLPMALKLPHVAYIEEDSSIFAQSIPWNLQRIIQTKHETGKYTPPNDGAQVTVFLLDTSVQTDHREIEGKVMVTDFNSMPKEDGTRFHESASKCESHGTHIAGVLSGRDAGVARGVSVNTVRVLNCQGRGTVSGALAGLEYIRASLQAQPVSPVIILLPFVGGFSRTLNTACREMVHSGAVLIAAAGNYQDDACMYSPASEPEVITVGASNAADRPLSSGTTGTNLGRCVDVFAPGEDIISASGDCSTCFVSMSGTSQSAAHAAGIAAVLLNAYPSASPAEVLQLLRYHAVQRVINPDSLPPEHYLTTPDMVAALPTSAATGEKLLCRSVWSKRSGVGSFDTAVARCRHGEEMFSCSSYSPNGVHAGERIEIRDGQKVCEAHHGIGGQGVYAVARCCTGSRVKCHASASLHVGIDAECPSQEFQLTGCSSHYIRSQDVAQPSWPLHSNRKACPAGEGGTSHAFCCHAPNLECHLIEHHQSENTTQVEVSCEDSWTLTGCNAVSHGSVTHAAYTRGNTCVIQMFGGDKGAAAIAICCRYRPLDQQSNNNHEQNTGGLEVLFQGPGHHHHHHSAWSHPQFEK

SEQ ID NO: 140 - protein, 706 aa, Artificial Sequence
  synthetic
MHLVLVLCLAALAACQGAHIVMVDAYKPTKGGSGGDYSEDQEVKAPQLDHPDPGTERVAELLRCTKSVWRIPEQYLVVLREGTRDSHVQRTVSTLRAQAARRGHAIHIMHTYSGVFHGFLIKMSSEVLPMALKLPHVAYIEEDSSIFAQSIPWNLQRIIQTKHETGKYTPPNDGAQVTVFLLDTSVQTDHREIEGKVMVTDFNSMPKEDGTRFHESASKCESHGTHIAGVLSGRDAGVARGVSVNTVRVLNCQGRGTVSGALAGLEYIRASLQAQPVSPVIILLPFVGGFSRTLNTACREMVHSGAVLIAAAGNYQDDACMYSPASEPEVITVGASNAADRPLSSGTTGTNLGRCVDVFAPGEDIISASGDCSTCFVSMSGTSQSAAHAAGIAAVLLNAYPSASPAEVLQLLRYHAVQRVINPDSLPPEHYLTTPDMVAALPTSAATGEKLLCRSVWSKRSGVGSFDTAVARCRHGEEMFSCSSYSPNGVHAGERIEIRDGNKSCEAHHGIGGQGVYAVARCCTGSRVKCHASASLHVGIDAECPSQEFQLTGCSSHYIRSQDVAQPSWPLHSNRKACPAGEGGTSHAFCCHAPNLECHLIEHHQSEFTKQVEVSCEDSWTLTGCNAVSHGSVTHAAYTRGNTCVIQMFGGDKGAAAIAICCRYRPLDQQSNNNHEQNTGGLEVLFQGPGHHHHHHSAWSHPQFEK

SEQ ID NO: 141 - protein, 706 aa, Artificial Sequence
  synthetic
MHLVLVLCLAALAACQGAHIVMVDAYKPTKGGSGGDYSEDQEVKAPQLDHPDPGTERVAELLRCTKSVWRIPEQYLVVLREGTRDSHVQRTVSTLRAQAARRGHAIHIMHTYSGVFHGFLIKMSSEVLPMALKLPHVAYIEEDSSIFAQSIPWNLQRIIQTKHETGKYTPPNDGAQVTVFLLDTSVQTDHREIEGKVMVTDFNSMPKEDGTRFHESASKCESHGTHIAGVLSGRDAGVARGVSVNTVRVLNCQGRGTVSGALAGLEYIRASLQAQPVSPVIILLPFVGGFSRTLNTACREMVHSGAVLIAAAGNYQDDACMYSPASEPEVITVGASNAADRPLSSGTTGTNLGRCVDVFAPGEDIISASGDCSTCFVSMSGTSQSAAHAAGIAAVLLNAYPSASPAEVLQLLRYHAVQRVINPDSLPPEHYLTTPDMVAALPTSAATGEKLLCRSVWSKRSGVGSFDTAVARCRHGEEMFSCSSYSPNGVHAGERIEIRDGQKVCEAHHGIGGQGVYAVARCCTGSRVKCHASASLHVGIDAECPSQEFQLTGCSSHYIRSQDVAQPSWPLHSNRKACPAGEGGTSHAFCCHAPNLECHLIEHHQSEFTKQVEVSCENSTTLTGCNAVSHGSVTHAAYTRGNTCVIQMFGGDKGAAAIAICCRYRPLDQQSNNNHEQNTGGLEVLFQGPGHHHHHHSAWSHPQFEK

SEQ ID NO: 142 - protein, 706 aa, Artificial Sequence
  synthetic
MHLVLVLCLAALAACQGAHIVMVDAYKPTKGGSGGDYSEDQEVKAPQLDHPDPGTERVAELLRCTKSVWRIPEQYLVVLREGTRDSHVQRTVSTLRAQAARRGHAIHIMHTYSGVFHGFLIKMSSEVLPMALKLPHVAYIEEDSSIFAQSIPWNLQRIIQTKHETGKYTPPNDGAQVTVFLLDTSVQTDHREIEGKVMVTDFNSMPKEDGTRFHESASKCESHGTHIAGVLSGRDAGVARGVSVNTVRVLNCQGRGTVSGALAGLEYIRASLQAQPVSPVIILLPFVGGFSRTLNTACREMVHSGAVLIAAAGNYQDDACMYSPASEPEVITVGASNAADRPLSSGTTGTNLGRCVDVFAPGEDIISASGDCSTCFVSMSGTSQSAAHAAGIAAVLLNAYPSASPAEVLQLLRYHAVQRVINPDSLPPEHYLTTPDMVAALPTSAANGTKLLCRSVWSKRSGVGSFDTAVARCRHGEEMFSCSSYSPNGVHAGERIEIRDGQKVCEAHHGIGGQGVYAVARCCTGSRVKCHASASLHVGIDAECPSQEFQLTGCSSHYIRSQDVAQPSWPLHSNRKACPAGEGGTSHAFCCHAPNLECHLIEHHQSEFTKQVEVSCEDSWTLTGCNAVSHGSVTHAAYTRGNTCVIQMFGGDKGAAAIAICCRYRPLDQQSNNNHEQNTGGLEVLFQGPGHHHHHHSAWSHPQFEK

SEQ ID NO: 143 - protein, 706 aa, Artificial Sequence
  synthetic
MHLVLVLCLAALAACQGAHIVMVDAYKPTKGGSGGDYSEDQEVKAPQLDHPDPGTERVAELLRCTKSVWRIPEQYLVVLREGTRDSHVQRTVSTLRAQAARRGHAIHIMHTYSGVFHGFLIKMSSEVLPMALKLPHVAYIEEDSSIFAQSIPWNLQRIIQTKHETGKYTPPNDGAQVTVFLLDTSVQTDHREIEGKVMVTDFNSSPKEDGTRFHESASKCESHGTHIAGVLSGRDAGVARGVSVNTVRVLNCQGRGTVSGALAGLEYIRASLQAQPVSPVIILLPFVGGFSRTLNTACREMVHSGAVLIAAAGNYQDDACMYSPASEPEVITVGASNAADRPLSSGTTGTNLGRCVDVFAPGEDIISASGDCSTCFVSMSGTSQSAAHAAGIAAVLLNAYPSASPAEVLQLLRYHAVQRVINPDSLPPEHYLTTPDMVAALPTSAATGEKLLCRSVWSKRSGVGSFDTAVARCRHGEEMFSCSSYSPNGVHAGERIEIRDGQKVCEAHHGIGGQGVYAVARCCTGSRVKCHASASLHVGIDAECPSQEFQLTGCSSHYIRSQDVAQPSWPLHSNRKACPAGEGGTSHAFCCHAPNLECHLIEHHQSEFTKQVEVSCEDSWTLTGCNAVSHGSVTHAAYTRGNTCVIQMFGGDKGAAAIAICCRYRPLDQQSNNNHEQNTGGLEVLFQGPGHHHHHHSAWSHPQFEK

SEQ ID NO: 144 - protein, 706 aa, Artificial Sequence
  synthetic
MHLVLVLCLAALAACQGAHIVMVDAYKPTKGGSGGDYSEDQEVKAPQLDHPDPGTERVAELLRCTKSVWRIPEQYLVVLREGTRDSHVQRTVSTLRAQAARRGHAIHIMHTYSGVFHGFLIKMSSEVLPMALKLPHVAYIEEDSSIFAQSIPWNLQRIIQTKHETGKYTPPNDGANVSVFLLDTSVQTDHREIEGKVMVTDFNSMPKEDGTRFHESASKCESHGTHIAGVLSGRDAGVARGVSVNTVRVLNCQGRGTVSGALAGLEYIRASLQAQPVSPVIILLPFVGGFSRTLNTACREMVHSGAVLIAAAGNYQDDACMYSPASEPEVITVGASNAADRPLSSGTTGTNLGRCVDVFAPGEDIISASGDCSTCFVSMSGTSQSAAHAAGIAAVLLNAYPSASPAEVLQLLRYHAVQRVINPDSLPPEHYLTTPDMVAALPTSAATGEKLLCRSVWSKRSGVGSFDTAVARCRHGEEMFSCSSYSPNGVHAGERIEIRDGQKVCEAHHGIGGQGVYAVARCCTGSRVKCHASASLHVGIDAECPSQEFQLTGCSSHYIRSQDVAQPSWPLHSNRKACPAGEGGTSHAFCCHAPNLECHLIEHHQSEFTKQVEVSCEDSWTLTGCNAVSHGSVTHAAYTRGNTCVIQMFGGDKGAAAIAICCRYRPLDQQSNNNHEQNTGGLEVLFQGPGHHHHHHSAWSHPQFEK

SEQ ID NO: 145 - protein, 781 aa, Artificial Sequence
  synthetic
MHLVLVLCLAALAACDYSEDQEVKAPQLDHPDPGTERVAELLRCTKSVWRIPEQYLVVLREGTNDTHVQRTVSTLRAQAARRGNATHIMHTYSGVFHGFLIKMSSEVLPMALKLPHVAYIEEDSSIFAQSIPWNLQRIIQTKHETGKYTPPNDGANVSVFLLDTSVQTDHREIEGKVMVTDFNSSPKEDGTRFHESASKCESHGTHIAGVLSGRDAGVARGVSVNTVRVLNCQGRGTVSGALAGLEYIRASLQAQPVSPVIILLPFVGGFSRTLNTACREMVHSGAVLIAAAGNYQDDACMYSPASEPEVITVGASNAADRPLSSGTTGTNLGRCVDVFAPGEDIISASGDCSTCFVSMSGTSQSAAHAAGIAAVLLNAYPSASPAEVLQLLRYHAVQRVINPDSLPPEHYLTTPDMVAALPTSAANGTKLLCRSVWSKRSGVGSNDSAVARCRHGEEMFSCSSYSPNGVHAGERIEIRDGNKSCEAHHGIGGQGVYAVARCCTGSRVKCHASASLHVGIDAECPSQEFQLTGCSSHYIRSQDVAQPSWPLHNNSKACPAGEGGTSHAFCCHAPNLECHLIEHHQSENTTQVEVSCEDSWTLTGCNAVSHGSVTHAAYTRGNTCVIQMFGGDKGAAAIAICCRYRPLDQQSNNNHEQNTGSGDSATHIKFSKRDEDGKELAGATMELRDSSGKTISTWISDGQVKDFYLYPGKYTFVETAAPDGYEVATAITFTVNEQGQVTVNGKATKGDAHIGGLEVLFQGPGHHHHHHSAWSHPQFEK

SEQ ID NO: 146 - protein, 706 aa, Artificial Sequence
  synthetic
MHLVLVLCLAALAACQGAHIVMVDAYKPTKGGSGGDYSEDQEVKAPQLDHPDPGTERVAELLRCTKSVWRIPEQYLVVLREGTNDTHVQRTVSTLRAQAARRGNATHIMHTYSGVFHGFLIKMSSEVLPMALKLPHVAYIEEDSSIFAQSIPWNLQRIIQTKHETGKYTPPNDGANVSVFLLDTSVQTDHREIEGKVMVTDFNSSPKEDGTRFHESASKCESHGTHIAGVLSGRDAGVARGVSVNTVRVLNCQGRGTVSGALAGLEYIRASLQAQPVSPVIILLPFVGGFSRTLNTACREMVHSGAVLIAAAGNYQDDACMYSPASEPEVITVGASNAADRPLSSGTTGTNLGRCVDVFAPGEDIISASGDCSTCFVSMSGTSQSAAHAAGIAAVLLNAYPSASPAEVLQLLRYHAVQRVINPDSLPPEHYLTTPDMVAALPTSAANGTKLLCRSVWSKRSGVGSNDSAVARCRHGEEMFSCSSYSPNGVHAGERIEIRDGNKSCEAHHGIGGQGVYAVARCCTGSRVKCHASASLHVGIDAECPSQEFQLTGCSSHYIRSQDVAQPSWPLHNNSKACPAGEGGTSHAFCCHAPNLECHLIEHHQSENTTQVEVSCEDSWTLTGCNAVSHGSVTHAAYTRGNTCVIQMFGGDKGAAAIAICCRYRPLDQQSNNNHEQNTGGLEVLFQGPGHHHHHHSAWSHPQFEK

SEQ ID NO: 147 - protein, 16 aa, Artificial Sequence
  synthetic
KEDGTRFHRSASKCES

SEQ ID NO: 148 - protein, 7 aa, Artificial Sequence
  synthetic
RDAGVAR

SEQ ID NO: 149 - protein, 15 aa, Artificial Sequence
  synthetic
DIISASGDCSTCFVS

SEQ ID NO: 150 - DNA, 2064 bp, Artificial Sequence
  synthetic
atgcatctggtgctggtgctgtgtctggctgccctggccgcctgtgattacagcgaggacaaagaagtgaaggcccctcagctggatcaccccgatcctggaacagagagagtggccgagctgctgagatgcaccaagagcgtttggagaatccccgagcagtacctggtggtgctgagagagggcaccagagatagccacgtgcagagaaccgtgtctaccctgagagcccaggccgctagaagaggacacgccatccacatcatgcacacctacagcggcgtgttccacggctttctgatcaagatgagcagcgaggtgctgcccatggctctgaaactgcctcacgtggcctacatcgaagaggactcctctatcttcgcccagagcatcccctggaacctgcagagaatcatccagaccaagcacgagacaggcaagtacacccctcctaacgatggcgcccaagtgaccgtgttcctgctggatacaagcgtgcagaccgaccaccgggaaatcgagggcaaagtgatggtcaccgacttcaacagcatgcccaaagaggacggcacccggtttcacagatctgccagcaagtgtgaaagccacggcacccatattgccggcgtgctgtctggaagagatgctggcgttgcaagaggcgtgtccgtgaataccgtgcgggtgctgaattgccaaggcagaggaacagtgtcaggcgctctggccggactcgagtatatcagagccagtctgcaggcccagcctgtgtctcccgtgatcatcctgctgcctttcgtcggcggcttcagcagaacactgaacaccgcctgtcgcgagatggtgcattctggcgctgtgctgattgccgccgctggcaactatcaggacgacgcctgtatgtacagccccgcctctgagcctgaagtgatcacagtgggagccagcaacgccgccgatagacctctcagctctggcaccacaggcaccaatctgggcagatgcgtggacgttttcgcccctggcgaggatatcatcagcgcctctggcgattgcagcacctgtttcgtgtctatgagcggcacctctcagagcgctgcacatgccgctggaattgctgccgtcctgctgaacgcctatccttctgcttctcccgccgaagtgctgcagctgctcagatatcacgctgtgcagagagtgatcaaccccgactctctgcctcctgagcactacctgaccacacctgatatggtggccgctctgcctacatctgccgccacaggcgaaaagctgctgtgtagaagcgtgtggtccaagagaagcggcgtgggcagctttgatacagccgtggccagatgcagacacggcgaggaaatgttcagctgctccagctacagccccaatggcgttcacgccggcgagagaatcgagatcagagatggccagaaagtgtgcgaggcccaccacggaattggaggacaaggcgtgtacgccgtggctaggtgttgtacaggcagcagagtgaagtgtcacgcctctgcctcactgcatgtgggcattgatgccgagtgtcccagccaagagtttcagctgaccggctgcagcagccactacatcagatcccaggatgtggctcagcccagctggccactgcacagcaatagaaaagcctgtcctgccggcgaaggcggaacaagccatgccttttgttgtcacgcccctaacctggaatgccacctgatcgaacaccaccagagcgagttcaccaaacaggtggaagtgtcctgcgaggacagctggaccctgacaggctgtaatgccgtgtctcacggctctgtgacccatgccgcttacaccagaggcaatacctgcgtgatccagatgttcggcggcgataagggcgctgccgccattgccatctgctgcagatacagacccctggaccagcagtccaacaacaaccacgagcagaataccggcggactggaagtgctgtttcaaggccctggacaccaccaccatcaccactctgcttggagccatcctcagttcgagaagtgatga

SEQ ID NO: 151 - DNA, 2055 bp, Artificial Sequence
  synthetic
atgcatctggtgctggtgctgtgtctggctgccctggccgcctgtgattacagcgaggaccaggaagtgaaggcccctcagctggatcaccccgatcctggaacagagagagtggccgagctgctgagatgcaccaagagcgtttggagaatccccgagcagtacctggtggtgctgagagagggcaccagagatagccacgtgcagagaaccgtgtctaccctgagagcccaggccgctagaagaggacacgccatccacatcatgcacacctacagcggcgtgttccacggctttctgatcaagatgagcagcgaggtgctgcccatggctctgaaactgcctcacgtggcctacatcgaagaggactcctctatcttcgcccagagcatcccctggaacctgcagagaatcatccagaccaagcacgagacaggcaagtacacccctcctaacgatggcgcccaagtgaccgtgttcctgctggatacaagcgtgcagaccgaccaccgggaaatcgagggcaaagtgatggtcaccgacttcaacagcatgcccaaagaggacggcacccggtttcacgagtctgccagcaagtgtgaaagccacggcacccatattgccggcgtgctgtctggaagagatgctggcgttgcaagaggcgtgtccgtgaataccgtgcgggtgctgaattgccaaggcagaggaacagtgtcaggcgctctggccggactcgagtatatcagagccagtctgcaggcccagcctgtgtctcccgtgatcatcctgctgcctttcgtcggcggcttcagcagaacactgaacaccgcctgtcgcgagatggtgcattctggcgctgtgctgattgccgccgctggcaactatcaggacgacgcctgtatgtacagccccgcctctgagcctgaagtgatcacagtgggagccagcaacgccgccgatagacctctcagctctggcaccacaggcaccaatctgggcagatgcgtggacgttttcgcccctggcgaggatatcatcagcgcctctggcgattgcagcacctgtttcgtgtctatgagcggcacctctcagagcgctgcacatgccgctggaattgctgccgtcctgctgaacgcctatccttctgcttctcccgccgaagtgctgcagctgctcagatatcacgctgtgcagagagtgatcaaccccgactctctgcctcctgagcactacctgaccacacctgatatggtggccgctctgcctacatctgccgccacaggcgaaaagctgctgtgtagaagcgtgtggtccaagagaagcggcgtgggcagctttgatacagccgtggccagatgcagacacggcgaggaaatgttcagctgctccagctacagccccaatggcgttcacgccggcgagagaatcgagatcagagatggccagaaagtgtgcgaggcccaccacggaattggaggacaaggcgtgtacgccgtggctaggtgttgtacaggcagcagagtgaagtgtcacgcctctgcctcactgcatgtgggcattgatgccgagtgtcccagccaagagtttcagctgaccggctgcagcagccactacatcagatcccaggatgtggctcagcccagctggccactgcacagcaatagaaaagcctgtcctgccggcgaaggcggaacaagccatgccttttgttgtcacgcccctaacctggaatgccacctgatcgaacaccaccagagcgagttcaccaaacaggtggaagtgtcctgcgaggacagctggaccctgacaggctgtaatgccgtgtctcacggctctgtgacccatgccgcttacaccagaggcaatacctgcgtgatccagatgttcggcggcgataagggcgctgccgccattgccatctgctgcagatacagacccctggaccagcagtccaacaacaaccacgagcagaataccggcggactggtgcccaggggcagccaccaccaccatcaccactctgcttggagccatcctcagttcgagaagtgatga

SEQ ID NO: 152 - protein, 114 aa, Artificial Sequence
  synthetic
DYSEDKEVKAPQLDHPDPGTERVAELLRCTKSVWRIPEQYLVVLREGTRDSHVQRTVSTLRAQAARRGHAIHIMHTYSGVFHGFLIKMSSEVLPMALKLPHVAYIEEDSSIFAQ

SEQ ID NO: 153 - protein, 557 aa, Artificial Sequence
  synthetic
SIPWNLQRIIQTKHETGKYTPPNDGAQVTVFLLDTSVQTDHREIEGKVMVTDFNSMPKEDGTRFHRSASKCESHGTHIAGVLSGRDAGVARGVSVNTVRVLNCQGRGTVSGALAGLEYIRASLQAQPVSPVIILLPFVGGFSRTLNTACREMVHSGAVLIAAAGNYQDDACMYSPASEPEVITVGASNAADRPLSSGTTGTNLGRCVDVFAPGEDIISASGDCSTCFVSMSGTSQSAAHAAGIAAVLLNAYPSASPAEVLQLLRYHAVQRVINPDSLPPEHYLTTPDMVAALPTSAATGEKLLCRSVWSKRSGVGSFDTAVARCRHGEEMFSCSSYSPNGVHAGERIEIRDGQKVCEAHHGIGGQGVYAVARCCTGSRVKCHASASLHVGIDAECPSQEFQLTGCSSHYIRSQDVAQPSWPLHSNRKACPAGEGGTSHAFCCHAPNLECHLIEHHQSEFTKQVEVSCEDSWTLTGCNAVSHGSVTHAAYTRGNTCVIQMFGGDKGAAAIAICCRYRPLDQQSNNNHEQNTGGLEVLFQGPGHHHHHHSAWSHPQFEK

SEQ ID NO: 154 - protein, 557 aa, Artificial Sequence; identical to SEQ ID NO: 153
  synthetic

SEQ ID NO: 155 - protein, 491 aa, Artificial Sequence
  synthetic
SASKCESHGTHIAGVLSGRDAGVARGVSVNTVRVLNCQGRGTVSGALAGLEYIRASLQAQPVSPVIILLPFVGGFSRTLNTACREMVHSGAVLIAAAGNYQDDACMYSPASEPEVITVGASNAADRPLSSGTTGTNLGRCVDVFAPGEDIISASGDCSTCFVSMSGTSQSAAHAAGIAAVLLNAYPSASPAEVLQLLRYHAVQRVINPDSLPPEHYLTTPDMVAALPTSAATGEKLLCRSVWSKRSGVGSFDTAVARCRHGEEMFSCSSYSPNGVHAGERIEIRDGQKVCEAHHGIGGQGVYAVARCCTGSRVKCHASASLHVGIDAECPSQEFQLTGCSSHYIRSQDVAQPSWPLHSNRKACPAGEGGTSHAFCCHAPNLECHLIEHHQSEFTKQVEVSCEDSWTLTGCNAVSHGSVTHAAYTRGNTCVIQMFGGDKGAAAIAICCRYRPLDQQSNNNHEQNTGGLEVLFQGPGHHHHHHSAWSHPQFEK

SEQ ID NO: 156 - protein, 114 aa, Artificial Sequence; identical to SEQ ID NO: 152
  synthetic

SEQ ID NO: 157 - protein, 108 aa, Artificial Sequence
  synthetic
EVKAPQLDHPDPGTERVAELLRCTKSVWRIPEQYLVVLREGTRDSHVQRTVSTLRAQAARRGHAIHIMHTYSGVFHGFLIKMSSEVLPMALKLPHVAYIEEDSSIFAQ

SEQ ID NO: 158 - protein, 66 aa, Artificial Sequence
  synthetic
SIPWNLQRIIQTKHETGKYTPPNDGAQVTVFLLDTSVQTDHREIEGKVMVTDFNSMPKEDGTRFHR

SEQ ID NO: 159 - protein, 24 aa, Artificial Sequence
  synthetic
GGLVPRGSHHHHHHSAWSHPQFEK

SEQ ID NO: 160 - protein, 27 aa, Artificial Sequence
  synthetic
GGLEVLFQGPGHHHHHHSAWSHPQFEK

SEQ ID NO: 161 - protein, 504 aa, Artificial Sequence
  synthetic
GGGGSGGGGSMKNLDCWVDNEEDIDVILKKSTILNLDINNDIISDISGFNSSVITYPDAQLVPGINGKAIHLVNNESSEVIVHKAMDIEYNDMFNNFTVSFWLRVPKVSASHLEQYGTNEYSIISSMKKHSLSIGSGWSVSLKGNNLIWTLKDSAGEVRQITFRDLPDKFNAYLANKWVFITITNDRLSSANLYINGVLMGSAEITGLGAIREDNNITLKLDRCNNNNQYVSIDKFRIFCKALNPKEIEKLYTSYLSITFLRDFWGNPLRYDTEYYLIPVASSSKDVQLKNITDYMYLTNAPSYTNGKLNIYYRRLYNGLKFIIKRYTPNNEIDSFVKSGDFIKLYVSYNNNEHIVGYPKDGNAFNNLDRILRVGYNAPGIPLYKKMEAVKLRDLKTYSVQLKLYDDKNASLGLVGTHNGQIGNDPNRDILIASNWYFNHLKDKILGCDWYFVPTDEGWTNDGGGLVPQQSGAHIVMVDAYKPTKGSGHHHHHHSAWSHPQFEK

SEQ ID NO: 162 - protein, 42 aa, Artificial Sequence
  synthetic
GGGLVPQQSGAHIVMVDAYKPTKGSGHHHHHHSAWSHPQFEK

SEQ ID NO: 163 - protein, 557 aa, Artificial Sequence
  synthetic
SIPWNLQRIIQTKHETGKYTPPNDGANVSVFLLDTSVQTDHREIEGKVMVTDFNSSPKEDGTRFHESASKCESHGTHIAGVLSGRDAGVARGVSVNTVRVLNCQGRGTVSGALAGLEYIRASLQAQPVSPVIILLPFVGGFSRTLNTACREMVHSGAVLIAAAGNYQDDACMYSPASEPEVITVGASNAADRPLSSGTTGTNLGRCVDVFAPGEDIISASGDCSTCFVSMSGTSQSAAHAAGIAAVLLNAYPSASPAEVLQLLRYHAVQRVINPDSLPPEHYLTTPDMVAALPTSAANGTKLLCRSVWSKRSGVGSNDSAVARCRHGEEMFSCSSYSPNGVHAGERIEIRDGNKSCEAHHGIGGQGVYAVARCCTGSRVKCHASASLHVGIDAECPSQEFQLTGCSSHYIRSQDVAQPSWPLHNNSKACPAGEGGTSHAFCCHAPNLECHLIEHHQSENTTQVEVSCEDSWTLTGCNAVSHGSVTHAAYTRGNTCVIQMFGGDKGAAAIAICCRYRPLDQQSNNNHEQNTGGLEVLFQGPGHHHHHHSAWSHPQFEK

SEQ ID NO: 164 - protein, 134 aa, Artificial Sequence
  synthetic
QGAHIVMVDAYKPTKGGSGGDYSEDQEVKAPQLDHPDPGTERVAELLRCTKSVWRIPEQYLVVLREGTNDTHVQRTVSTLRAQAARRGNATHIMHTYSGVFHGFLIKMSSEVLPMALKLPHVAYIEEDSSIFAQ

1. A composition comprising a polypeptide comprising a sequence of amino acids consisting essentially of SEQ ID NO: 145 or SEQ ID NO: 146.

2-26. (canceled)

27. The composition of claim 1, further comprising an immunogenic carrier.

28. The composition of claim 27, wherein the immunogenic carrier is selected from the group consisting of rTTHc, a nanoparticle, SPYTAG, and SPYCATCHER.

29-33. (canceled)

34. The composition of claim 28, wherein the nanoparticle contains a SPYTAG.

35. (canceled)

36. The composition of claim 28, wherein the nanoparticle contains a SPYCATCHER.

37-62. (canceled)

63. A method of preventing, alleviating, or treating a condition selected from atherosclerosis, coronary artery disease, cardiovascular disease, acute coronary syndrome, a dyslipidemia, and Alzheimer's disease in an individual, comprising administering a therapeutically effective amount of the composition of claim 1 to the individual.

64. The method of claim 63, wherein the composition is administered in combination with at least one additional agent selected from the group consisting of a statin, a bile acid sequestrant, niacin, a fibric acid derivative, and a long chain alpha, omega-dicarboxylic acid.

65-71. (canceled)

72. A nucleic acid encoding a polypeptide comprising a sequence of amino acids consisting essentially of SEQ ID NO: 145 or SEQ ID NO: 146.

73. The nucleic acid of claim 72, wherein the nucleic acid is an RNA molecule.

74. (canceled)

75. The nucleic acid of claim 72, operably linked to a promoter.

76. A genetic vector comprising the nucleic acid of claim 72.

77. The vector of claim 76, wherein the vector is a viral vector.

78. A host cell comprising the vector of claim 76.

79. An immunogenic composition comprising the vector of claim 76 and a carrier.

80. A method of preventing, alleviating, or treating a cancer in an individual, comprising administering a therapeutically effective amount of the composition of claim 1.

81. The method of claim 80, further comprising administering at least one cancer therapeutic agent to the individual.

82. The method of claim 81. wherein the cancer therapeutic agent is an immune checkpoint therapy agent.
